(19) United States
(12) Patent Application Publication
(10) Pub. No.: US 2003/0138803 A1
(43) Pub. Date: Jul. 24, 2003

(54) Identification and use of molecules implicated in pain

(76) Inventors: Robert Alan Brooksbank, Cambridge (GB); Alistair Kerr Dixon, Cambridge (GB); Kevin Lee, Cambridge (GB); Robert Denham Pinnock, Ann Arbor, MI (US)

Correspondence Address: Mehdi Ganjeizadeh, Ph.D., Warner-Lambert Company, 2800 Plymouth Road, Ann Arbor, MI, 48105, US

(21) Appl. No.: 10/205,219

(22) Filed: Jul. 24, 2002

(30) Foreign Application Priority Data
Feb. 7, 2002 (GB) 0202910.6
Jul. 27, 2001 (GB) 0118354.0

(51) Int. Cl. G01N 33/00; C12Q 1/68; G01N 33/53; G01N 33/567; C12N 9/12

(52) U.S. Cl. 435/6; 800/3; 435/7.2; 435/194

(57) ABSTRACT

The invention relates to the use of:

(a) an isolated gene sequence that is up regulated in the spinal cord in response to streptozocin-induced diabetes;

(b) an isolated gene sequence comprising a nucleic acid sequence of Tables I to X.

(c) an isolated gene sequence having at least 80% sequence identity with a nucleic acid sequence of Tables I to X;

(d) an isolated nucleic acid sequence that is hybridizable to any of the gene sequences according to (a), (b) or (c) under stringent hybridisation conditions;

(e) a recombinant vector comprising a gene sequence or nucleic acid sequence according to any one of (a) to (d);

(f) a host cell containing the vector according to (e);

(g) a non-human animal having in its genome an introduced gene sequence or nucleic acid sequence or a removed or down-regulated gene sequence or nucleic acid sequence according to any one of (a) to (d);

(h) an isolated polypeptide comprising an amino acid sequence at least 90% identical to an amino acid sequence encoded by a nucleotide sequence according to any one of (a) to (d), or a polypeptide variant thereof with sequential amino acid deletions from the C terminus and/or the N-terminus; or

(i) an isolated polypeptide encoded by a nucleotide sequence according to any one of (a) to (d); or

(k) an isolated antibody that binds specifically to a polypeptide according to (h) or (i);

in the screening of compounds for the treatment of pain, or for the diagnosis of pain.

The invention also relates to the use of naturally occurring compounds such as peptide ligands of the expression products of the above gene sequences and their associated signal transduction pathways for use in the treatment of pain.

[0001] This application claims the priority of United Kingdom application NO. 0118354.0, filed Jul. 27, 2001, and United Kingdom application NO. 0202910.6, filed Feb. 7, 2002; the entire contents of which applications are hereby incorporated by reference herein.

### FIELD OF THE INVENTION

[0002] The present invention relates to nucleic acids, their expression products and pathways involved in pain, and their use in screening for molecules that can alleviate pain. The invention further relates to methods for the assay and diagnosis of pain in patients.

### BACKGROUND TO THE INVENTION

[0003] Pain is currently classified into four general types. Post-operative acute pain can be successfully treated with existing pain medications of e.g. the opioid and non-steroidal anti-inflammatory (NSAID) types, and is usually short-term and self-limiting. A second type of pain, present e.g. in cancer and arthritis, is also responsive to medication initially with a NSAID and in its later stages with opioids. Neuropathic pain arises from damage to the central or peripheral nerve systems, and is more effectively treated with antidepressants or anticonvulsants. A fourth type of pain called central sensitisation results from changes in the central nervous system as a result of chronic pain, these changes often being irreversible and difficult to treat. Nerve pain from shingles or diabetes falls into this and the neuropathic category. Changes occur where pain is at first poorly controlled and gradually progress to the point where a person is sensitive to stimuli which would not normally cause pain, for example a light touch. People with pain of this kind often describe a widening of the pain area to include areas which had originally not been injured or which were thought not to be involved in pain. This classification is, however based on clinical symptoms rather than on the underlying pain mechanisms.

[0004] Opiates such as morphine belong to a traditional class of pain-relieving compounds that are now recognized as binding to opiate receptors. Naturally occurring polypeptides have also been found to have opiate-like effects on the central nervous system, and these include β-endorphin, met-enkephalin and leu-enkephalin.

[0005] Salicin was isolated at the beginning of the 19th century, and from that discovery a number of NSAIDs such as aspirin, paracetamol, ibuprofen, flurbiprofen and naproxen were developed. NSAIDs are by far the most widely used pain-relieving compounds, but can exhibit side effects, in particular irritation of the GI tract that can lead to the formation of ulcers, gastrointestinal bleeding and anaemia.

[0006] Interest in the neurobiology of pain is developing: see a colloquium sponsored by the US National Academy of Sciences in December 1998 concerning the neurobiology of pain and reviewed in The Scientist 13[1], 12, 1999. Many pain mechanisms were discussed including the role of the capsaicin receptors in pain, (M. J. Caterina et al., Nature, 389, 816-824, 1997). Large dosages of capsaicin were reported to disable that receptor, (W. R. Robbins et al., Anesthesia and Analgesia, 86, 579-583, 1998). Additionally, a c-resistant sodium channel found in small diameter pain-sensing neurons (PN3) was discussed (A. N. Akopian et al., Nature, 379, 257-262, 1986) and L. Sangameswaran et al., Journal of Biological Chemistry, 271, 953-956, 1996). Its involvement in transmission and sensitization to pain signals has been reported, (S. D. Novakovic et al., Journal of Neuroscience, 18, 2174-2187, 1998). A further tetrodotoxin-resistant sodium channel has been reported (S. Tate et al., Nature Neuroscience, 1, 653-655 1998).

[0007] Second messenger systems have also been shown to be important since knockout-mice lacking protein kinase C (PKC) γ were reported to respond to acute pain e.g. from a hot surface, but not to respond to neuropathic pain when their spinal nerves are injured (Malmberg et al., Science, 278, 279-283 (1997).

[0008] Present methods for identifying novel compounds that relieve pain of one or more of the types indicated above suffer from the defect that they are dependent either on the relatively limited number of receptors known to be involved in pain or on the empirical identification of new receptors which is an uncertain process. In relation to known receptors, for example the opioid receptor, research directed to improved compounds offers the possibility of screening compounds that have a better therapeutic ratio and fewer side effects. It does not lead naturally to compounds for different pain receptors that have new modes of action and new and qualitatively different benefits. Even when newly identified additional receptors are taken into account, known receptors revolve around tens of gene products. However, there are between 30,000 and 40,000 genes in the genome of an animal and more of them are concerned with nervous system function than with peripheral function. We therefore concluded that a large number of receptors and pathways are important to the transduction of pain, but up to now have remained unknown.

### SUMMARY OF THE INVENTION

[0009] It is an object of the invention to provide sequences of genetic material for which no role in pain has previously been disclosed, and which are useful, for example, in:

[0010] identifying metabolic pathways for the transduction of pain

[0011] identifying from said metabolic pathways compounds having utility in the diagnosis or treatment of pain

[0012] producing proteins and polypeptides with a role in the transduction of pain;

[0013] producing genetically modified non-human animals that are useful in the screening of compounds having utility in the treatment or diagnosis of pain.

[0014] Identifying ligand molecules for said receptors involved in metabolic pathways and having utility in the treatment of pain.

[0015] It is yet a further object of the invention to provide molecules, non-human animals and microorganisms that can be used in screening compounds for pharmacological activity, especially pain-reducing activity.

[0016] In one aspect, the invention relates to the use in the screening of compounds that are effective in the treatment of pain, or in the diagnosis of pain, of:

[0017] (a) an isolated gene sequence that is up-regulated in the spinal cord of a mammal in response to streptozocin-induced diabetes;

[0018] (b) an isolated gene sequence having at least 80% sequence identity with any of the nucleic acid sequences of Tables I-X, preferably 85% sequence identity, more preferably 90%, increasingly preferably 95%, most preferably 99%.

[0019] (c) an isolated nucleic acid sequence comprising a sequence that is hybridizable to any of the gene sequences according to (a) and (b) under stringent hybridisation conditions;

[0020] (d) a recombinant vector comprising any one of the gene sequences according to (a), (b) or (c);

[0021] (e) a host cell containing the vector according to (d);

[0022] (f) a non-human animal, for use in the screening of compounds that are effective in the treatment of pain, or in the diagnosis of pain, having in its genome an introduced gene sequence or a removed or down-regulated nucleotide sequence that is an isolated gene sequence that is up-regulated in the spinal cord of a mammal in response to streptozocin-induced diabetes;

[0023] (g) an isolated polypeptide containing an amino acid sequence at least 90% identical to an amino acid sequence encoded by a nucleic acid or gene sequence according to any one of (a) to (d), or a variant polypeptide thereof with sequential amino acid deletions from the C terminus and/or the N-terminus; or

[0024] (h) an isolated antibody that binds specifically to the isolated polypeptide according to (g).

[0025] The invention also relates to the use of naturally occurring compounds such as peptide ligands of the expression products of the above gene sequences and their associated signal transduction pathways for the treatment of pain.

### DESCRIPTION OF PREFERRED EMBODIMENTS

[0026] Definitions

[0027] Within the context of the present invention:

[0028] “Comprising” means consisting of or including. Thus nucleic acid comprising a defined sequence includes nucleic acid that may contain a full-length gene or full-length cDNA. The gene may include any of the naturally occurring regulatory sequence(s), such as a transcription and translation start site, a promoter, a TATA box in the case of eukaryotes, and transcriptional and translational stop sites. Further, a nucleic acid sequence comprising a cDNA or gene may include any appropriate regulatory sequences for the efficient expression thereof in vitro.

[0029] “Isolated” requires that the material be removed from its original environment (e.g. the natural environment if it is naturally occurring). For example, a naturally occurring polynucleotide or a peptide present in a living animal is not isolated, but the same polynucleotide or peptide, separated from some or all of the coexisting materials in the natural system, is isolated. Such polynucleotide can be part of a vector and/or such polynucleotide or peptide can be part of a composition, and still be isolated in that the vector or composition is not a part of its natural environment.

[0030] “Purified” does not require absolute purity; instead it is intended as a relative definition. Purification of starting materials or natural materials from their native environment to at least one order of magnitude, preferably two or three orders, and more preferably four or five orders of magnitude is expressly contemplated.

[0031] “Nucleic acid sequence” or “gene sequence” means a sequence of nucleotides or any variant or homologue thereof, or truncated or extended sequence thereof, and is preferably indicated by a Genebank accession number. Also within the scope of the present invention are up-regulated nucleic acid sequences which encode expression products which are components of signaling pathways. This invention also includes any variant or homologue or truncated or extended sequence of the up-regulated nucleotide sequence. Also within the scope of the present invention, the term “nucleic acid(s) product”, or “expression product” or “gene product” or a combination of these terms refers without being biased, to any, protein(s), polypeptide(s), peptide(s) or fragment(s) encoded by the up-regulated nucleotide sequence.

[0032] “Operably linked” refers to a linkage of polynucleotide elements in a functional relationship. For instance, a promoter or an enhancer is operably linked to a coding sequence if it regulates the transcription of the coding sequence. In particular, two DNA molecules (such as a polynucleotide containing a promoter region and a polynucleotide encoding a desired polypeptide) are said to be “operably linked” if the nature of the linkage between the two polynucleotides does not (1) result in the introduction of a frame-shift mutation and (2) interfere with the ability of the polynucleotide containing the promoter to direct the transcription of the coding polynucleotide.

[0033] “Pain” includes chronic pain and in particular diabetic pain.

[0034] “Stringent hybridization conditions” is a recognized term in the art and for a given nucleic acid sequence refers to those conditions which permit hybridization of that sequence to its complementary sequence and closely homologous sequences. Conditions of high stringency may be illustrated in relation to filter-bound DNA as for example. 2×SCC, 65° C. (where SSC=0.15M sodium chloride, 0.015M sodium citrate, pH 7.2), or as 0.5M NaHPO₄, 7% sodium dodecyl sulfate (SDS), 1 mM EDTA, at 65° C., and washing in 0.1×SCC/0.1% SDS at 68° C. (Ausubel F. M. et al., eds, 1989, Current Protocols in Molecular Biology, Vol. I, Green Publishing Associates, Inc., and John Wiley & Sons Inc., New York, at p. 2. 10.3). Hybridization conditions can be rendered highly stringent by raising the temperature and/or by the addition of increasing amounts of formamide, to destabilize the hybrid duplex of non-homologous nucleic acid sequence relative to homologous and closely homologous nucleic acid sequences. Thus, particular hybridisation conditions can be readily manipulated, and will generally be chosen depending on the desired results.

[0035] “Variants or homologues” include (a) sequence variations of naturally existing gene(s) resulting from polymorphism(s), mutation(s), or other alteration(s) as compared to the above identified sequences, and which do not deprive the encoded protein of function (b) recombinant DNA molecules, such as cDNA molecules encoding genes indicated by the relevant Genebank accession numbers and (c) any sequence that hybridizes with the above nucleic acids under stringent conditions and encodes a functional protein or fragment thereof.

[0036] “Gene product” refers to polypeptide—which is interchangeable with the term protein—which is encoded by a nucleotide sequence and includes single-chain polypeptide molecules as well as multiple-polypeptide complexes where individual constituent polypeptides are linked by covalent or non-covalent means.

[0037] Polypeptides of the present invention may be produced by synthetic means (e.g. as described by Geysen et al., 1996) or by recombinant means.

[0038] The terms “variant”, “homologue”, “fragment”, “analogue” or “derivative” in relation to the amino acid sequence for the polypeptide of the present invention includes any substitution of, variation of, modification of, replacement of, deletion of or addition of one (or more) amino acid from or to the sequence providing the resultant polypeptide has the native gene product activity. In particular, the term “homologue” covers homology with respect to structure and/or function. With respect to sequence homology, there is at least 90%, more preferably at least 95% homology to an amino acid sequence encoded by the relevant nucleotide sequence shown in Tables I-X, preferably there is at least 98% homology.

[0039] Typically, for the variant, homologue or fragment of the present invention, the types of amino acid substitutions that could be made should maintain the hydrophobicity/hydrophilicity of the amino acid sequence. Amino acid substitutions may include the use of non-naturally occurring amino acid analogues.

[0040] In addition, or in the alternative, the protein itself could be produced using chemical methods to synthesize a polypeptide, in whole or in part. For example, peptides can be synthesized by solid phase techniques, cleaved from the resin, and purified by preparative high performance liquid chromatography (e.g. Creighton (1983) Proteins Structures and Molecular Principles, W H Freeman and Co., New York, N.Y., USA). The composition of the synthetic peptides may be confirmed by amino acid analysis or sequencing (e.g. the Edman degradation procedure).

[0041] Direct peptide synthesis can be performed using various solid-phase techniques (Roberge J Y et al Science Vol 269 1995 202-204) and automated synthesis may be achieved, for example, using the ABI 431 A Peptide Synthesizer (Perkin Elmer) in accordance with the instructions provided by the manufacturer. Additionally, the amino acid sequence of a gene product, or any part thereof, may be altered during direct synthesis and/or combined using chemical methods with a sequence from other subunits, or any part thereof, to produce a variant polypeptide.

[0042] In another embodiment of the invention, a gene product natural, modified or recombinant amino acid sequence may be ligated to a heterologous sequence to encode a fusion protein. For example, for screening of libraries for compounds and peptide agonists and antagonists of gene product activity, it may be useful to encode a chimeric gene product expressing a heterologous epitope that is recognised by a commercially available antibody. A fusion protein may also be engineered to contain a cleavage site located between a gene product sequence and the heterologous protein sequence, so that the gene product may be cleaved and purified away from the heterologous moiety.

[0043] The gene product may also be expressed as a recombinant protein with one or more additional polypeptide domains added to facilitate protein purification. Such purification facilitating domains include, but are not limited to, metal chelating peptides such as histidine-tryptophan modules that allow purification on immobilised metals (Porath J, Protein Expr Purif Vol 3 1992 p263-281), protein A domains that allow purification on immobilised immunoglobulin, and the domain utilised in the FLAGS extension/affinity purification system (Immunex Corp, Seattle, Wash., USA). The inclusion of a cleavable linker sequence such as Factor XA or enterokinase (Invitrogen, San Diego, Calif., USA) between the purification domain and the gene product is useful to facilitate purification.

[0044] Identified Sequences

[0045] The inventors have identified nucleotide sequences that give rise to expression products listed in Tables I-X, that become differentially expressed in the spinal cord in response to streptozocin-induced diabetes and that are believed to be involved in the transduction of pain. In the Tables below, * denotes more preferred nucleic acid sequences and ** denotes most preferred nucleic acid sequences. These nucleic acid sequences have not previously been implicated in the transduction of pain.

[0046] The validity of the present experimental procedure was confirmed by the fact that nucleotide sequences were obtained as a result of the investigation whose function in the transduction of pain has been previously confirmed and established. These nucleic acid sequences are not part of this invention. Any of the nucleic acid sequences and expression products can be used to develop screening technologies for the identification of novel molecules for the prevention or treatment of pain. These screening technologies could also be used to ascribe new pain therapeutic indications to molecules, which have not previously been ascribed for the prevention or treatment of pain. Furthermore, the said nucleic acid sequences can be used as diagnostic tools and for the development of diagnostic tools.

[0047] The sequences of the invention have been identified as up-regulated in the spinal cord in response to streptozocin-induced diabetes. They have not been identified as up-regulated in an experiment involving chronic constrictive injury of the sciatic nerve.

TABLE I
Sequences whose expression products are kinases

| Expression | Rat | Mouse | Human | | |
|---|---|---|---|---|---|
| product or name | Accession | accession | Accession | | |
| (Reference) | Number | number | Number | Reaction | Assay |
| Janus protein | AJ000556 | S63728 | | Non-receptor | kinase |
| tyrosine kinase 1 | (SEQ ID | | | Tyr kinase | |
| (JAK1) | No's 1-2) | | | | |
| (Ref: N/A) | | | | | |
| Phosphatidyl- | D84667 | | | Cell | Phospholipid |
| inositol 4-kinase | (SEQ ID | | | signalling | kinase |
| Ref: 1) | No's 3-4) | | | | |
| Rho kinase | U38481 | U58513 | D87931 | Cell | Ser/Thr kinase; |
| Alpha (Ref: 2) | SEQ ID | | | signalling | reorganization of |
| | NO's 5-6) | | | | the |
| | | | | | cytoskeleton. |
| Casein kinase II | L15619 | | | Cell | Ser/Thr kinase; |
| beta subunit* | (SEQ ID | | | signalling | cell growth and |
| (Ref: 3) | No's 7-8) | | | | proliferation |
| ERK3, protein | M64301 | | X80692 | MAP kinase | Ser/Thr kinase; |
| serine/threonine | (SEQ ID | | | pathway | mediation of |
| kinase, | NO's 9-10) | | | | response to |
| extracellular* | | | | | extracellular |
| (Ref: 4) | | | | | signals |
| Neural receptor | M55291 | X17647 | | Tyrosine | kinase |
| protein-tyrosine | (SEQ ID | | | kinase | |
| kinase (trkB)* | NO's 11-12) | | | receptor | |
| (Ref: 5) | | | | | |

[0048] TABLE II
Sequences whose expression products are phosphatases

| Expression | Rat | Mouse | Human | | |
|---|---|---|---|---|---|
| product or name | accession | accession | Accession | | |
| (Reference) | number | number | Number | Reaction | Assay |
| Protein tyrosine | AJ007016 | AF035644 | U48297 | N/A | Phosphatase |
| phosphatase* | (SEQ ID | | | | |
| (Ref: 6) | No's 13-14) | | | | |
| Putative receptor | U55057 | | | N/A | Receptor Tyr |
| tyrosine | (SEQ ID | | | | |
| phosphatase* | NO's 15-16) | | | | |
| (REF: N/A) | | | | | |
| Calcineurin, A | M31809 | | M29550 | N/A | N/A |
| subunit, beta | (SEQ ID | | | | |
| isoform* | NO's 17-18) | | | | |
| (Ref: 7) | | | | | |

[0049] TABLE III
Sequences whose expression products are phosphodiesterases

| | RAT | MOUSE | HUMAN | |
|---|---|---|---|---|
| Expression product | ACCESSION | ACCESSION | ACCESSION | |
| or name (Reference) | NUMBER | NUMBER | NUMBER | Reaction |
| Phosphodiesterase, | L27058 | | L20966 | Cell signalling; |
| cAMP-specific | (SEQ ID No's | | | homolog of the dnc |
| (PDE4D)** | 19-20 | | | learning and |
| (Ref: 8) | | | | memory gene |

[0050] TABLE IV
Sequences whose expression products are receptors

| | | Mouse | Human | | |
|---|---|---|---|---|---|
| Expression Product or | Rat Accession | accession | Accession | | |
| Name (Ref) | Number | Number | Number | Reaction | Assay |
| Neurotensin | X97121 | | | Recognises | N/A |
| receptor type 2 | (SEQ ID | | | neurotensin | |
| (NTR2) | No's 21-22) | | | and | |
| (Ref: 9) | | | | levocabastine | |
| Putative | | X85999 | | N/A | IL-1 |
| interleukin 1 | | (SEQ ID | | | |
| receptor | | No's 23-24) | | | |
| accessory | | | | | |
| protein** | | | | | |
| (Ref: 10) | | | | | |

[0051] TABLE V
Sequences whose expression products are transporters

| Expression | Rat | Mouse | Human | | |
|---|---|---|---|---|---|
| Product or | Accession | Accession | Accession | | |
| Name (Ref) | Number | Number | Number | Reaction | Assay |
| Amino acid | AF249673 | | | Amino acid | Transporter |
| system A | (SEQ ID | | | uptake | |
| transporter | No's 25-26) | | | | |
| (Ref: 11) | | | | | |
| Digoxin carrier | U88036 | | | Organic | Transporter; |
| protein (Ref: 12) | (SEQ ID | | | anion | brain; digoxin |
| | No's 27-28) | | | transporter | and cardiac |
| | | | | | glycosides |
| Synaptic vesicle | L01788 | | | Transmembrane | Transporter |
| transmembrane | (SEQ ID | | | transport | |
| transporter | No 29) | | | | |
| (Ref: 13) | | | | | |
| Glycine | L13600 | | | Neurotransmitter | Transporter |
| transporter** | (SEQ ID | | | transport | assay (glycine) |
| (Ref: 14) | No's 30-31) | | | | |
| Putative SEDL | AF157065 | | AF157065 | Vesicle | transporter |
| spondylo-epiphesial | | | (SEQ ID No's | traficking | |
| dysplasia tarda | | | 32-33) | | |
| gene (Ref: 15) | | | | | |
| Delta-aminolevulinate | D86297 | | | | |
| synthase, | (SEQ ID | | | | |
| erythroid-specific | No's 34-35) | | | | |
| **(Ref: 16) | | | | | |
| Polypeptide | U35890 | | | | |
| GalNAc | (SEQ ID | | | | |
| transferase T1** | No's 36-37) | | | | |
| (Ref: 17) | | | | | |
| Putative NAD+ | | AJ007780 | | | |
| ADP-ribosyltransferase. | | (SEQ ID | | | |
| **(Ref: 18) | | No's 38-39) | | | |

[0052] TABLE VI
Sequences whose expression products are G-protein
coupled receptor proteins

| Expression | Rat | Mouse | Human | | |
|---|---|---|---|---|---|
| product or | Accession | Accession | Accession | | |
| Name (Ref) | Number | Number | Number | Reaction | Assay |
| Putative K-ras | | | M54968 | Cell signalling | N/A |
| (Ref: 19) | | | (SEQ ID No's | | |
| | | | 40-41) | | |
| ARF-like protein | RAS-related | | X78604 | Membrane | N/A |
| 5 ARL5* | | | (SEQ ID No's | traficking | |
| (Ref: 20) | | | 42-43) | | |

[0053] TABLE VII
Sequences whose expression products are DNA-binding proteins

| Expression | Rat | Mouse | Human | | |
|---|---|---|---|---|---|
| Product or | Accession | Accession | Accession | | |
| Name (Ref) | Number | Number | Number | Reaction | Assay |
| TBP-binding | D87671 | D87671 | | DNA | N/A |
| protein TIP 120 | (SEQ ID | | | replication | |
| (Ref: 21) | No's 44-45) | | | | |
| Putative | AF054177 | | | Chromatin | Helicase |
| chromodomain- | (SEQ ID | | | structural | |
| helicase-DNA- | No's 46-47) | | | protein | |
| binding protein | | | | | |
| (Ref: 22) | | | | | |
| Putative origin | | AJ003140 | | DNA | N/A |
| recognition | | (SEQ ID | | replication | |
| complex subunit | | No's 48-49) | | | |
| 4: Orc 4 gene | | | | | |
| (Ref: 23) | | | | | |

[0054] TABLE VIII
Sequences whose expression products are proteases

| Expression | Rat | Mouse | Human | | |
|---|---|---|---|---|---|
| Product or | Accession | Accession | Accession | | |
| Name (Ref) | Number | Number | Number | Reaction | Assay |
| Carboxypeptidase | U62897 | D85391 | U65090 | Pre-hormone | Protease |
| D precursor | (SEQ ID | | | metallocarboxy | |
| (Ref: 24) | No's 50-51) | | | peptidase | |
| Caspase 2 (Ich-1) | U77933 | | | Apoptotic | protease |
| (Ref: 25) | (SEQ ID | | | protein | |
| | No's 52-53) | | | | |
| Cathepsin B | X82396 | M14222 | | Thiol protease | protease |
| (Ref: 26) | (SEQ UD | | | | |
| | No's 54-55) | | | | |
| Cathepsin L (EC | Y00697 | M20495 | | Cysteine | protease |
| 34.22.15) | (SEQ ID | | | protease | |
| (Ref: 27) | No's 56-57) | | | | |
| Dipeptidyl-peptidase | M76427 | AF092507 | M96850 | Inactive | N/A |
| (dpp6) | (SEQ ID | | | aminopeptidase | |
| (Ref: 28) | No's 58-59) | | | family member | |
| Proteasome | M58593 | AF055983 | D00762 | Protein turnover | Endoprotease |
| subunit C8 | (SEQ ID | | | | |
| (Ref: 29) | No's 60-61) | | | | |
| Putative | D29956 | AF057146 | D29956 | Protein turnover | N/A |
| deubiquitinating | | (Seq ID | | | |
| enzyme 8 | | No's 62-63) | | | |
| (Ref: 30) | | | | | |

[0055] TABLE IX
Sequences whose expression products are other enzymes

| Expression | Rat | Mouse | Human | | |
|---|---|---|---|---|---|
| product or | Accession | Accession | Accession | | |
| Name (Ref) | Number | Number | Number | Reaction | Assay |
| Putative | | | E12457 | Ubiquination | Ligase |
| ubiquitin-conjugating | | | (SEQ ID No 64) | | |
| enzyme (EC | | | | | |
| 6.3.2.-) E2 | | | | | |
| (Ref: 31) | | | | | |
| Putative | | X69656 | | Protein | Ligase |
| tryptophanyl-tRNA | | (SEQ ID | | systhesis | |
| synthetase | | No's 65-66) | | | |
| (Ref: 32) | | | | | |
| Aldolase A | M12919 | Y00516 | M11560 | Glycolysis | Lyase |
| (Ref 33) | (SEQ ID | | | | |
| | No's 67-68) | | | | |
| 3-Hydroxy-3-methylglutaryl | M29249 | | M11058 | N/A | Oxidoreductase |
| coenzyme A | (SEQ ID | | | | |
| reductase | NO's 69-70) | | | | |
| (Ref: 34) | | | | | |
| NADH subunit 5, | X14848 | | | Energy | Oxidoreductase |
| mitochondrial | (SEQ ID No | | | metabolism | |
| (Ref: N/A) | 71) | | | | |
| Electron transfer | M22030 | | | Energy | Oxidoreductase |
| flavoprotein | (SEQ ID | | | metabolism | |
| (ETF), alpha | No's 72-73) | | | | |
| subunit | | | | | |
| (Ref: 35) | | | | | |
| Delta-amino-levulinate | D86297 | | | Porpbyrin | Transferase |
| synthase, | (SEQ ID | | | biosysthesis | |
| erythroid-specific** | No's 74-75) | | | | |
| (Ref: 36) | | | | | |
| Polypeptide | U35890 | | | Protein | Transferase |
| GalNAc | (SEQ ID | | | glycosylation | |
| transferase T1* | No's 76-77) | | | | |
| (Ref: 37) | | | | | |
| Arginase II | U90887 | U90886 | | NO synthesis | Hydrolase |
| (Ref: 38) | SEQ ID | | | | |
| | NO's 78-79) | | | | |
| ATP synthase | L19927 | | D16563 | Energy | Hydrolase |
| gamma chain, | (SEQ ID NO | | | metabolism | |
| mitochondrial | 80-81) | | | | |
| (REF: 39) | | | | | |
| N-G,N-G-dimethylarginine | D86041 | | | NO metabolism | Hydrolase |
| dimethylaminohydrolase | (SEQ ID | | | | |
| (Ref 40) | No's 82-83) | | | | |
| Putative gluco-cerebrosidase | | M24119 | | N/A | Hydrolase |
| (Ref: 41) | | (SEQ ID | | | |
| | | NO's 84-85) | | | |
| Putative N-acetyl- | | | Z12173 | N/A | Hydrolase |
| glucosamine-6- | | | (SEQ ID NO's | | |
| sulfatase | | | 86-87) | | |
| (Ref: 42) | | | | | |

[0056] TABLE X
Other sequences

| Expression Product | | Mouse | | |
|---|---|---|---|---|
| or | Rat Accession | Accession | Human Accession | |
| Name (Ref) | Number | Number | Number | Reaction |
| 12S rRNA | J01438 | S63167 | | Protein synthesis |
| (Ref: 43) | (SEQ ID No 88) | | | |
| Ischaemia responsive | AF077354 | AF077354 | | Stress response |
| 94 kD protein | (Seq ID No's | | | |
| (Ref: 44) | 89-90) | | | |
| Putative cops2 | AF071312 | | | Protein turnover |
| signalosome | (SEQ ID No's | | | |
| component | 91-92) | | | |
| (Ref: 45) | | | | |
| rS-Rex-s, human NSP | U17603 | | | Unknown |
| C homolog (Ref: 46) | (SEQ ID No's | | | |
| | 93-94) | | | |
| Rat haemoglobin | M27169 | | | Haemoglobin |
| beta-chain | (SEQ ID No 95) | | | |
| (Ref: 47) | | | | |
| PMSG-induced | D84485 | | | Unknown |
| ovarian mRNA | (SEQ ID No 96) | | | |
| (Ref: N/A) | | | | |
| TBP binding protein | D87671 | D87671 | | DNA replication |
| TIP 120 | (SEQ ID No's | | | |
| (Ref: 48) | 97-98) | | | |
| Chromosone region | AJ238278 | | | Promotes nuclear |
| maintenance 1 | (SEQ ID No's | | | export of proteins |
| protein; CRM1 | 99-100) | | | |
| (Ref: 49) | | | | |
| SGC10 | | L20263 | | Unknown |
| (Ref 50) | | (Seq. ID No 101) | | |
| Myosin heavy chain | S68736 | | | Cytoskeleton |
| (Ref: 51) | (Seq ID No's | | | |
| | 102-103) | | | |
| Putative KIAA1157 | AB032983 | | AB032983 | Unknown |
| (Ref: 52) | (SEQ ID NO's | | | |
| | 104-105) | | | |
| Putative Shyc | | AF072697 | | Unknown |
| (Ref: 53) | | (SEQ ID No's | | |
| | | 106-107) | | |
| Microtubule | U30938 | | | Cytoskeleton/ |
| associated protein | (Seq ID No 108) | | | cellular transport |
| MAP2 | | | | |
| (Ref: 54) | | | | |
| Putative chromatin | U40375 | | | Structural protein |
| structure regulator, | (SEQ ID NO's | | | |
| related to human | 109-110) | | | |
| SUPT6H (U46691) | | | | |
| (Ref: 55) | | | | |
| Putative ZPR1 zinc | | U41287 | | Unknown |
| finger protein | | (SEQ ID No's | | |
| (Ref: 56) | | 111-112) | | |
| Putative KIAA0627 | AB014527 | | | Unknown |
| (Ref: 57) | (SEQ ID No's | | | |
| | 113-114) | | | |
| Statin-related protein | M62751 | M62751 | X70940 | Protein synthesis |
| (REF NO: 58) | (SEQ ID NO's | | | |
| | 115-116) | | | |
| Dyactin subunit p62 | AF190798 | AF190798 | | Cytoskeleton |
| (Ref: 59) | (SEQ ID NO's | | | |
| | 117-118) | | | |
| Phosphacan | U04998 | | | Extracellular |
| (Ref: 60) | (SEQ ID No's | | | interacting protein |
| | 119-120) | | | |
| Putative | AF160213 | | AF160213 | Unknowm |
| endomembrane | | | (SEQ ID No's 121-122) | |
| protein emp70 isolog | | | | |
| (Ref: N/A) | | | | |
| Putative iswi | L27127 | | | Chromatin structure |
| homologue | (Drosophilia) | | | |
| Ref: 61 | (SEQ ID NO's | | | |
| | 123-124) | | | |
| Putative sorting nexin | AF121856 | | AF121856 | Protein turnover |
| 6 (Ref: 62) | | | (SEQ ID No's 125-126) | |
| Putative profilin II | L10678 | | L10678 | Cytoskeleton |
| (REF: 63) | | | (SEQ ID NO's 127-128 | protein |
| Putative testican | | MMTCAN | | Extracellular |
| (Ref: 64) | | X92864 | | interactions |
| | | (SEQ ID NO's | | |
| | | 129-130) | | |
| Putative p53 | | U41751 | | p53 induced |
| responsive EI24 | | (SEQ ID NO's | | apoptosis |
| Ref: 65) | | 131-132) | | |
| Matrin 3 | M63485 | M63485 | | Nuclear matrix |
| (Ref: 66) | (SEQ ID NO's | | | |
| | 133-134) | | | |
| Putative KIAA0287 | AB006625 | | AB006625 | Unknown |
| (Ref: N/A) | | | (SEQ ID NO's 135-136) | |
| Putative Rho GDP | | L42463 | | Cell signalling |
| dissociation inhibitor | | (SEQ ID No's | | |
| GDI (Ref: 67) | | 137-138) | | |
| Putative gene for | | | D21094 | Unknown |
| motor protein | | | (SEQ ID No's 139-140) | |
| (Ref: N/A) | | | | |
| Putative phosohatidyl | | U96725 | | IP3 second |
| inositol transfer | | (SEQ ID No's | | messenger |
| protein alpha | | 141-142) | | production |
| (Ref: 68) | | | | |
| Putative centrin | | AF080592 | | Mitosis-centrosome |
| (Cetn2) (Ref: 69) | | (SEQ ID No's | | association |
| | | 143-144) | | |
| Beta-tubulin | X03369 | | | Cytoskeleton |
| (Ref: 70) | (SEQ ID No's | | | |
| | 145-146) | | | |
| Putative formin | | U40751 | | Unknown |
| binding protein | | (SEQ ID NO's | | |
| (Ref: 71) | | 147-148) | | |
| Putative NY-REN-58 | | | AF155115 | Unknown |
| antigen (Ref: 72) | | | (SEQ ID No's 149-150) | |
| Putative radixin | | X60672 | | Cytoskeleton |
| (Ref: N/A) | | (SEQ ID No's | | protein |
| | | 151-152) | | |
| Splicing fctor 1 | AF079873 | AF079873 | | |
| homolog | (SEQ ID No's | | | |
| (Ref: N/A) | 153-154) | | | |
| SH3-containing | AF026505 | AF026505 | | Unknown |
| protein p4015 | (SEQ ID No's | | | |
| (Ref: 73) | 155-156) | | | |
| Putative sperm | | | X91879 | Unknown |
| specific protein | | | (SEQ ID No's 157-158) | |
| (Ref: 74) | | | | |
| Guanine-nucleotide- | L10336 | | | |
| releasing protein | (SEQ IS No's | | | |
| (mss4) (Ref: N/A) | 159-160) | | | |
| Intracellular calcium- | L18948 | L18948 | | Has been |
| binding protein | (SEQ ID No's | | | implicated in |
| MRP14 (Ref: 75) | 161-162) | | | susceptibility to |
| | | | | induced chronic |
| | | | | disease (arthritis) |
| PTB-like protein | AJ010585 | AJ010585 | AF176085 | Cell signalling |
| (Ref: N/A) | (SEQ ID NO's | | | |
| | 163-164) | | | |
| Putative 26S | U36395* | | | Protein turnover |
| proteasome subunit | (SEQ ID No's | | | |
| CADp44 (Ref: 76) | 165-166) | | | |
| Putative BM-020 | AF208862 | | AF208862 | Unknown |
| (Ref: 77) | | | (SEQ ID No's 167-168) | |
| Putative bullous | L11690 | | L11690 | Cell adhesion |
| pemphigoid antigen 1 | | | (SEQ ID No's 169-170) | |
| (Ref: 78) | | | | |
| Putative coatomer | AF205065 | | AF157833 | Vesicle coat protein |
| protein γ-2-COP | (Seq ID No's | | | |
| (Ref:79) | 171-172) | | | |
| Putative F-box protein | AF174601 | | AF174601 | Unknown |
| Fbx21 (Ref: 80) | | | (SEQ ID No's 173-174) | |
| pUTATIVE kiaa0235 | D87078 | | D87078 | Unknown |
| (Ref: 81) | | | (SEQ ID No's 175-176) | |
| Putative KIAA 1212 | | | AB033308 | Unknown |
| (Ref: 82) | | | (SEQ ID No's 177-178) | |
| Putative osteoglycin | | D31951 | | Bone formation |
| (Ref: 83) | | (SEQ ID No's | | |
| | | 179-180) | | |
| Putative RNA binding | | | AF051321 | Cell signalling |
| protein related to | | | (SEQ ID NO's | |
| Sam68 (Ref: N/A) | | | 181-182) | |
| Ribosomal protein 11 | X62146 | | | Protein synthesis |
| (Ref: 84) | (SEQ ID No's | | | |
| | 183-184) | | | |
| Tspan-2 | AJ271442 | | | Plasma membrane |
| (Ref: 85) | (SEQ ID NO's | | | protein ; signalling |
| | 185-186) | | | in oligodendrocytes |
| AMP deaminase | U90888 | | | Energy metabolism |
| isoform C | (SEQ ID No's | | | |
| (Ref: 86) | 187-188) | | | |
| Globin, α, major | M17083 | | | haemoglobin |
| (Ref: 87) | (SEQ ID No's | | | |
| | 189-190) | | | |
| Cytochrome b, | X14848 | | | Energy metabolism |
| mitochrondrial | Y17319 | | | |
| (Ref: 88) | (SEQ ID NO 191) | | | |
| Putative BB1 | S82470 | | | Unknown |
| progression enhanced | (SEQ ID NO's | | | |
| gene (Ref: 89) | 192-193) | | | |
| Putative GCI-21 | AF132955 | | | Unknown |
| (Ref: 90) | (SEQ ID No's | | | |
| | 194-195) | | | |
| Myelin proteolipid | M11185 | | | Brain proteolipid |
| brain PLP (Ref: 91) | (SEQ ID NO's | | | protein |
| | 196-197) | | | |

### Production of Polypeptides and Nucleic Acids

[0057] Vectors

[0058] Recombinant expression vectors comprising a nucleic acid can be employed to express any of the nucleic acid sequences of the invention. The expression products derived from such vector constructs can be used to develop screening technologies for the identification of molecules that can be used to prevent or treat pain, and in the development of diagnostic tool for the identification and characterization of pain. The expression vectors may also be used for constructing transgenic non-human animals.

[0059] Gene expression requires that appropriate signals be provided in the vectors, said signals including various regulatory elements such as enhancers/promoters from viral and/or mammalian sources that drive expression of the genes of interest in host cells. The regulatory sequences of the expression vectors used in the invention are operably linked to the nucleic acid sequences encoding the pain-associated proteins of interest or a peptide fragment thereof.

[0060] Generally, recombinant expression vectors include origins of replication, selectable markers, and a promoter derived from a highly expressed gene to direct transcription of a downstream nucleotide sequence. The heterologous nucleotide sequence is assembled in an appropriate frame with the translation, initiation and termination sequences, and if applicable a leader sequence direct the expression product into the periplasmic space, the extra-cellular medium or cell membrane.

[0061] In a specific embodiment wherein the vector is adapted for expressing desired sequences in mammalian host cells, preferred vectors will comprise an origin of replication from the desired host, a suitable promoter and an enhancer, and also any necessary ribosome binding sites, polyadenylation site, transcriptional termination sequences, and optionally 5′-flanking non-transcribed sequences. DNA sequences derived from the SV40 or CMV viral genomes, for example SV 40 or CMV origin, early promoters, enhancers, and polyadenylation sites may be used to provide the required non-transcribed genetic elements.

[0062] A recombinant expression vector used in the invention advantageously also comprises an untranscribed polynucleotide region located at the 3′end of the coding sequence (ORF), this 3′-UTR (untranslated region) polynucleotide being useful for stabilizing the corresponding mRNA or for increasing the expression rate of the vector insert if this 3′-UTR harbours regulation signal elements such as enhancer sequences.

[0063] Suitable promoter regions used in the expression vectors are chosen taking into account the host cell in which the nucleic acid sequence is to be expressed. A suitable promoter may be heterologous with respect to the nucleic acid sequence for which it controls the expression, or alternatively can be endogenous to the native polynucleotide containing the coding sequence to be expressed. Additionally, the promoter is generally heterologous with respect to the recombinant vector sequences within which the construct promoter/coding sequence has been inserted. Preferred promoters are the LacI, LacZ, T3 or T7 bacteriophage RNA polymerase promoters, the lambda PR, PL and Trp promoters (EP-0 036 776), the polyhedrin promoter, or the p10 protein promoter from baculovirus (kit Novagen; Smith et al., (1983); O'Reilly et al. (1992).

[0064] Preferred selectable marker genes contained in the expression recombinant vectors used in the invention for selection of transformed host cells are preferably dehydrofolate reductase or neomycin resistance for eukaryotic cell culture, TRP1 for S. cerevisiae or tetracycline, rifampicin or ampicillin resistance in E. coli, or Levamsaccharase for Mycobacteria, this latter marker being a negative selection marker.

[0065] Preferred bacterial vectors are listed hereafter as illustrative but not limitative examples: pQE70, pQE60, pQE-9 (Quiagen), pD10, phagescript, psiX174, p.Bluescript SK, pNH8A, pNH16A, pNH18A, pNH46A (Stratagene); pKK223-3, pKK233-3, pDR540, pRIT5 (Pharmacia); pWLNEO, pSV2CAT, pOG44, pXT1, pSG (Stratagene); pSVK3, pBPV, pMSG, pSVL (Pharmacia); pQE-30 (QIA express).

[0066] Preferred bacteriophage recombinant vectors of the invention are P 1 bacteriophage vectors such as described by Sternberg N. L. (1992;1994).

[0067] A suitable vector for the expression of any of the pain associated polypeptides used in the invention or fragments thereof, is a baculovirus vector that can be propagated in insect cells and in insect cell-lines. A specific suitable host vector system is the pVL 1392/1393 baculovirus transfer vector (Pharmingen) that is used to transfect the SF9 cell line (ATCC N°CRL 1711) that is derived from Spodoptera frugiperda.

[0068] The recombinant expression vectors of the invention may also be derived from an adenovirus. Suitable adenoviruses are described by Feldman and Steig (1996) or Ohno et al. (1994). Another preferred recombinant adenovirus is the human adenovirus type two or five (Ad 2 or Ad 5) or an adenovirus of animal origin (Patent Application WO 94/26914)

[0069] Particularly preferred retrovirus for the preparation or construction of retroviral in vitro or in vivo gene delivery vehicles include retroviruses selected from the group consisting of Mink-Cell Focus Inducing Virus, Murine Sarcoma Virus, and Ross Sarcoma Virus. Other preferred retroviral vectors are those described in Roth et al. (1996), in PCT Application WO 93/25234, in PCT Application WO 94/06920, and also in Roux et al. (1989), Julan et al.(1992) and Nada et al. (1991).

[0070] Yet, another viral vector system that is contemplated is the Adeno Associated Viruses (AAV) such as those described by Flotte et al. (1992), Samulski et al. (1989) and McLaughlin et al. (1996).

[0071] Host Cells Expressing Pain Associated Polypeptides

[0072] Host cells that endogenously express pain associated polypeptides or have been transformed or transfected with one of the nucleic acid sequences described herein, or with one of the recombinant vector described above, particularly a recombinant expression vector, can be used in the present invention. Also included are host cells that are transformed (prokaryotic cells) or are transfected (eukaryotic cells) with a recombinant vector such as one of those described above.

[0073] Preferred host cells used as recipients for the expression vectors used in the invention are the following:

[0074] (a) prokaryotic host cells: Escherichia coli, strains. (i.e. DH5-α, strain) Bacillus subtilis, Salmonella typhimurium and strains from species like Pseudomonas, Streptomyces and Staphylococcus for the expression of up and down-regulated nucleic acid sequences modulated by pain, characterized by having at least 80% sequence identity with any of the nucleic acid sequences of Tables I-X. Plasmid propagation in these host cells can provide plasmids for transfecting other cells.

[0075] (b) eukaryotic host cells: HeLa cells (ATCC N°CCL2; N°CCL2.1; N°CCL2.2), Cv 1 cells (ATCC N°CCL70), COS cells (ATCC N°CRL 1650; N°CRL 1651), Sf-9 cells (ATCC N°CRL 1711), C127 cells (ATCC N°CRL-1804), 3T3 cells (ATCC N°CRL-6361), CHO cells (ATCC N°CCL-61), human kidney 293 cells (ATCC N°45504; N°CRL-1573), BHK (ECACC N°84100501; N°84111301), PC12 (ATCC N°CRL-1721), T2, SHSY5Y (ATCC N°CRL-2266), NG108 (ECACC N°88112302) and F11, SK-N-SH (ATCC N°CRL-HTB-11), SK-N-BE(2) (ATCC N°CRL-2271), IMR-32 (ATCC N°CCL-127). A preferred system to which the nucleic acids of the invention can be expressed are neuronal cell lines such as PC 12, NT2, SHSY5Y, NG108 and F11, SK-N-SH, SK-N-BE(2), IMR-32 cell lines, COS cells, 3T3 cells, HeLa cells, 292 cells and CHO cells. The above cell lines could be used for the expression of any of the nucleic acid sequences of Tables I-X.

[0076] When a nucleic acid sequence of any of Tables I-X is expressed using a neuronal cell line, the sequence can be expressed through an endogenous promoter or native neuronal promoter, or an exogenous promoter. Suitable exogenous promoters include SV40 and CMV and eukaryotic promoters such as the tetracycline promoter. The preferred promoter when pain associated molecules are endogenously expressed is an endogenous promoter. A preferred promoter in a recombinant cell line is the CMV promoter.

[0077] In a specific embodiment of the host cells described above, these host cells have also been transfected or transformed with a polynucleotide or a recombinant vector for the expression of a natural ligand of any of the nucleic acid sequences of Tables I-X or a modulator of these expression products.

[0078] Proteins, Polypeptides and Fragments

[0079] The expression products of the nucleic acid sequences of Tables I-X or fragment(s) thereof can be prepared using recombinant technology, cell lines or chemical synthesis. Recombinant methods, chemical methods or chemical synthetic methods can be used to modify a gene in order to introduce into the gene product, or a fragment of the gene product, features such as recognition tags, cleavage sites or other modifications. For efficient polypeptide production, the endogenous expression system or recombinant expression system should allow the expression products to be expressed in a manner that will allow the production of a functional protein or fragment thereof which can be purified. Preferred cell lines are those that allow high levels of expression of polypeptide or fragments thereof. For efficient polypeptide production, the endogenous expression system or recombinant expression system should allow the expression products to be expressed in a manner that will allows the production of a functional protein or fragment thereof which can be purified. Preferred cell lines are those that allow high levels of expression of polypeptide or fragments thereof. Such cell lines include cell lines which naturally express any of the nucleic acid sequences of Tables I, II, or III or common mammalian cell lines such as CHO cells or COS cells, etc, or more specific neuronal cell lines such as PC12. However, other cell types that are commonly used for recombinant protein production such as insect cells, amphibian cells such as oocytes, yeast and prokaryotic cell lines such as E. coli can also be used.

[0080] The expression products of Tables I-X or fragments thereof can be utilized in screens to identify potential therapeutic ligands, either as a purified protein, as a protein chimera such as those produced by phage display, as a cell membrane (lipid or detergent) preparation, or in intact cells.

[0081] The invention also relates generally to the use of proteins, peptides and peptide fragments for the development of screening technologies for the identification of molecules for the prevention or treatment of pain, and the development of diagnostic tools for the identification and characterization of pain. These peptides include expression products of the nucleic acid sequences of Tables I-X and purified or isolated polypeptides or fragments thereof having at least 90%, preferably 95%, more preferably 98% and most preferably 99% sequence identity with the any of the expression products of nucleic acid sequences of Tables I-X. Expressed peptides and fragments of any of these nucleic acid sequences can be used to develop screening technologies for the identification of novel molecules for the prevention or treatment of pain. These screening technologies could also be used to ascribe new pain therapeutic indications to molecules, which have not previously been ascribed for the prevention or treatment of pain. Furthermore the said expressed peptides and fragments can be used as diagnostic tools and for the development of diagnostic tools.

[0082] Screening Methods

[0083] As discussed above, we have identified nucleic acid sequences whose expression is regulated by pain, particularly chronic pain and more particularly diabetic pain. The expression products of these nucleic acids can be used for screening ligand molecules for their ability to prevent or treat pain, and particularly, but not exclusively, chronic pain. The main types of screens that can be used are described below. The test compound can be a peptide, protein or chemical entity, either alone or in combination(s), or in a mixture with any substance. The test compound may even represent a library of compounds.

[0084] The expression products of any of the nucleic acid sequences of Tables I-X or fragments thereof can be utilized in a ligand binding screen format, a functional screen format or in vivo format. Examples of screening formats are provided.

[0085] A) Ligand Binding Screen

[0086] In ligand binding screening a test compound is contacted with an expression product of one of the sequences of Tables I-X, and the ability of said test compound to interact with said expression product is determined, e.g. the ability of the test compound(s) to bind to the expression product is determined. The expression product can be a part of an intact cell, lipidic preparation or a purified polypeptide(s), optionally attached to a support, such as beads, a column or a plate etc.

[0087] Binding of the test compound is preferably performed in the presence of a ligand to allow an assessment of the binding activity of each test compound. The ligand may be contacted with the expression product either before, simultaneously or after the test compound. The ligand should be detectable and/or quantifiable. To achieve this, the ligand can be labelled in a number of ways, for example with a chromophore, radioactive, fluorescent, phosphorescent, enzymatic or antibody label. Methods of labelling are known to those in the art. If the ligand is not directly detectable it should be amenable to detection and quantification by secondary detection, which may employ the above technologies. Alternatively the expression product or fragment thereof can be detectable or quantifiable. This can be achieved in a similar manner to that described above.

[0088] Binding of the test compound modifies the interaction of the ligand with its binding site and changes the affinity or binding of the ligand for/to its binding site. The difference between the observed amount of ligand bound relative to the theoretical maximum amount of ligand bound (or to the ligand bound in the absence of a test compound under the same conditions) is a reflection of the binding ability (and optionally the amount and/or affinity) of a test compound to bind the expression product.

[0089] Alternatively, the amount of test compound bound to the expression product can be determined by a combination of chromatography and spectroscopy. This can be achieved with technologies such as Biacore (Amersham Pharmacia). The amount of test compound bound to the expression product can also be determined by direct measurement of the change in mass upon compound or ligand binding to the expression product.

[0090] Alternatively, the expression product, compound or ligand can be fluorescently labelled and the association of expression product with the test compound can be followed by changes in Fluorescence Energy Transfer (FRET).

[0091] The invention therefore includes a method of screening for pain alleviating compounds, comprising:

[0092] a) contacting a test compound or test compounds in the presence of a ligand with an expression product of any of the above nucleic acid sequences of Tables I-X or with cell expressing at least one copy of the expression product or with a lipidic matrix containing at least one copy of the expression product;

[0093] b) determining the binding of the test compound to the expression product, and

[0094] c) selecting test compounds on the basis of their binding abilities.

[0095] In the above method, the ligand may be added prior to, simultaneously with or after contact of the test compound with the expression product. Non limiting examples and methodology can be gained from the teachings of the Molecular Probes handbook and references therein (Molecular Probes, Inc., 4849 Pitchford Ave, Eugene, USA), Methods in neurotransmitter receptor analysis (Yamamura H I., Enna, S J., and Kuhar, M J., Raven Press New York, the Glaxo Pocket Guide to Pharmacology, Dr. Michael Sheehan, Glaxo Group Research Ltd, Ware, Herts SG12 0DP), Bylund D B and Murrin L C (2000, Life Sciences, 67 (24) 2897-911), Owicki J C (2000, J. biomol Screen (5) 297-306), Alberts et al (1994, Molecular Biology of the Cell, 3^{rd} Edn, Garland Publication Inc), Butler J E, (2000 Methods 22(1):4-23, Sanberg S A (2000, Curr Opin Biotechnol 11(1) 47-53), and Christopoulos A (1999, biochem Pharmacol 58(5) 735-48).

[0096] B) Functional Screening

[0097] (a) Kinase Assays

[0098] The expression products of any of the nucleic acid sequences of Tables I-X which encodes a kinase, and in particular the nucleic acid sequences listed in Table I, are amenable to screening using kinase assay technology.

[0099] Kinases have the ability to add phosphate molecules to specific residues in ligands such as binding peptides in the presence of a substrate such as adenosine triphosphate (ATP). Formation of a complex between the kinase, the ligand and substrate results in the transfer of a phosphate group from the substrate to the ligand. Compounds that modulate the activity of the kinase can be determined with a kinase functional screen. Functional screening for modulators of kinase activity therefore involves contacting one or more test compounds with an expression product of one of the nucleic acid sequences of Tables I-X which encodes a kinase, and determining the ability of said test compound to modulate the transfer of a phosphate group from the substrate to the ligand.

[0100] The expression product can be part of an intact cell or of a lipidic preparation or it can be a purified polypeptide(s), optionally attached to a support, for example beads, a column, or a plate. Binding is preferably performed in the presence of ligand and substrate to allow an assessment of the binding activity of each test compound.

[0101] The ligand should contain a specific kinase recognition sequence and it should not be phosphorylated at its phosphoryation site. The ligand and/or substrate may be contacted with the kinase either before, simultaneously or after the test compound. Optionally the substrate may be labelled with a kinase transferable labelled phosphate. The assay is monitored by the phosphorylation state of the substrate and/or the ligand. The ligand should be such that its phosphorylation state can be determined. An alternative method to do this is to label the ligand with a phosphorylation-state-sensitive molecule. To achieve this, the ligand can be labelled in a number of ways, for example with a chromophore, radioactive, fluorescent, phosphorescent, enzymatic or antibody label. If the ligand is not directly detectable it should be amenable to detection and quantification by secondary detection, which may employ the above technologies. Such technologies are known to those in the art.

[0102] Binding of the test compound to the kinase modifies its ability to transfer a phosphate group from the substrate to the ligand. The difference between the observed amount of phosphate transfer relative to the theoretical maximum amount of phosphate transfer is a reflection of the modulatory effect of the test compound. Alternatively, the degree of phosphate transfer can be determined by a combination of chromatography and spectroscopy. The extent of phosphorylation of the ligand peptide or dephosphorylation of the substrate can also be determined by direct measurement. This can be achieved with technologies such as Biacore (Amersham Pharmacia).

[0103] The invention also provides a method for screening compounds for the ability to relieve pain, which comprises:

[0104] (a) contacting one or more test compounds in the presence of ligand and substrate with an expression product of any of the nucleotide sequences set out in Tables I-X which is a kinase or with a cell containing at least I copy of the expression product or with a lipidic matrix containing at least 1 copy of an expression product;

[0105] (b) determining the amount of phosphate transfer from the substrate to the ligand; and

[0106] (c) selecting test compounds on the basis of their capacity to modulate phosphate transfer.

[0107] Optionally ligand, substrate and/or other essential molecules may be added prior to contacting the test compound with expression product of step (a) or after step (a). Non limiting examples and methodology can be gained from the teachings of the Molecular Probes handbook and references therein (Molecular Probes, Inc., 4849 Pitchford Ave, Eugene, USA), Methods in Molecular Biology 2000; 99: 191-201, Oncogene 2000 20; 19(49): 5690-701, and FASAB Journal, (10, 6, P55, P1458, 1996, Pocius D Amrein K et al).

[0108] b) Phosphatase Assays

[0109] The expression products of any of the nucleic acid sequences of Tables I-X which encodes a phosphatase, and in particular the nucleic acid sequences listed in Table II, are amenable to screening using phosphatase assay technology.

[0110] Phosphatase enzymes have the ability to remove phosphate molecules from specific residues in ligands such as peptides. This reaction takes place in the presence of a substrate such as Adenosine Diphosphate (ADP). The complexing of the phosphatase polypeptide, ligand and substrate results in the transfer of a phosphate group from the ligand to substrate. Compounds that modulate the activity of the Phosphatase can be determined with a Phosphatase functional screen. This screen detects the reverse of the Kinase functional screen outlined above.

[0111] The invention also provides a method for screening compounds for the ability to relieve pain, which comprises:

[0112] (a) contacting at one or more test compounds in the presence of ligand and substrate with an expression product of any of the nucleotide sequences of Tables I-X which is a phosphatase or with a cell containing at least 1 copy of the expression product or with a lipidic matrix containing at least 1 copy of an expression product;

[0113] (b) determining the amount of phosphate transfer from the ligand to the substrate; and

[0114] (c) selecting test compounds on the basis of their capacity to modulate phosphate transfer.

[0115] Optionally ligand, substrate and/or other essential molecules may be added prior to contacting the test compound with expression product of step (a) or after step (a). Non-limiting examples and methodology can be gained from the teachings of the Molecular Probes handbook and references therein (Molecular Probes, Inc., 4849 Pitchford Ave, Eugene, USA), and FASAB Journal, (10, 6, P55, P1458, 1996, Pocius D Amrein K et al).

[0116] c) Phosphodiesterase Assays

[0117] An expression product of any of the nucleic acid sequences of Tables I-X which encodes a phosphodiesterase, and in particular any of the nucleic acid sequences listed in Table III, is amenable to screening using phosphodiesterase assay technology. Phosphodiesterases have the ability to cleave cyclic nucleotides cAMP (cyclic adenosine monophosphate) and/or cGMP (cyclic guanosine monophosphate) (substrate) at their 3′phosphatase bond to form 5′AMP and 5′GMP. Functional screening for modulators of phosphodiesterase polypeptide comprises contacting one or more test compounds with an expression product as set out above which is a phosphodiesterase and determining the ability of said test compound(s) to modulate the cleavage of cyclic nucleotides cAMP and/or cGMP at their 3′phosphatase bond to form 5′AMP and 5′GMP. The expression product can be part of an intact cell or lipidic preparation or a purified polypeptide(s), optionally attached to a support, for example beads, a column, or a plate. Binding is preferably performed in the presence of cAMP or cGMP to allow an assessment of the binding activity of each test compound. The cAMP or cGMP and other essential molecules may be contacted with the phosphodiesterase peptide either before, simultaneously or after the test compound(s).

[0118] A characteristic of the cAMP or cGMP is that it can readily be radiolabelled (Thompson et al, Advances in cyclic nucleotide research, 10, 69-92 (1974)). The conversion of cAMP or cGMP to 5′AMP or 5′GMP can be detected with the use of chromatography and separation technologies. Such technology is known to those in the art. Binding of the test compound to the phosphodiesterase polypeptide modifies its ability to convert cAMP or cGMP to 5′AMP or 5′GMP. The difference between the observed amount of conversion relative to the theoretical maximum amount of conversion is a reflection of the modulatory effect of the test compound(s).

[0119] A non-limiting general understanding of how to assay for the activity of Phosphodiesterases can be gained from Horton, J K. And Baxendale, P M (Methods in molecular Biology, 1995, 41, p 91-105, Eds. Kendall, D A. and Hill, S J, Humana Press, Towota, N.J.) and Molecular Probes handbook and references therein (Molecular Probes, Inc., 4849 Pitchford Ave, Eugene, USA).

[0120] The invention also provides a method of screening for pain alleviating compounds, comprising;

[0121] a) contacting one or more test compounds in the presence of cAMP and/or cGMP with an expression product of any of the nucleotide sequences of Tables I-X which is a phosphodiesterase or with a cell expressing at least 1 copy of an expression product or with a lipidic matrix containing at least 1 copy of an expression product;

[0122] b) determining the amount of cAMP and/or cyclic Guanosine Mono Phosphate converted to 5′AMP and/or 5′GMP, and

[0123] a) selecting test compounds on the basis of their ability to modulate said conversion.

[0124] d) Receptor Assays

[0125] An expression product of any of the nucleic acid sequences of Tables I-X which encodes a receptor, and in particular any of the nucleic acid sequences listed in Table IV, is amenable to screening using receptor assay technology.

[0126] Receptors are membrane associated proteins that initiate intracellular signalling upon ligand binding. Therefore, the identification of molecules for the prevention and treatment of pain can be achieved with the use of a ligand-binding assay, as outlined above. Such an assay would utilize an endogenous or non-endogenous ligand as a component of the ligand-binding assay. The binding of this ligand to the receptor in the presence of one or more test compounds would be measured as described above. Such is the nature of receptors that the assay is usually, but not exclusively performed with a receptor as an intact cell or membranous preparation.

[0127] The invention therefore includes a method of screening for pain alleviating compounds, comprising:

[0128] a) contacting a test compound or test compounds in the presence of a ligand with cells expressing at least one copy of the expression product of any of the nucleotide sequences as set out in Tables I-X which is a receptor or with a lipidic matrix containing at least one copy of the expression product;

[0129] b) determining the binding of the test compound to the expression product, and

[0130] c) selecting test compounds on the basis of their binding abilities.

[0131] e) Transporter Protein Assays

[0132] An expression product of any of the nucleic acid sequences of Tables I-X which encodes a transporter protein, and in particular any of the nucleic acid sequences listed in Table V, is amenable to screening using transporter protein assay technology. Non limiting examples of technologies and methodologies are given by Carroll F I, et al (1995, Medical Research Review, September 15 (5) p419-444), Veldhuis J D and Johnson Ml (1994, Neurosci. Biobehav Rep., winter 18(4) 605-12), Hediger M A and Nussberger S (1995, Expt Nephrol, July-August 3(4) p211-218, Endou H and Kanai Y, (1999, Nippon Yakurigaku Zasshi, Oct. 114 Suppl 1:1p-16p), Olivier B et al (2000, Prog. Drug Res., 54, 59-119), Braun A et al (2000, Eur J Pharm Sci, Oct 11, Supply 2 S51-60) and Molecular Probes handbook and references therein (Molecular Probes, Inc., 4849 Pitchfork Ave, Eugene, USA).

[0133] The main function of transporter proteins is to facilitate the movement of molecules across a cellular membrane. Compounds that modulate the activity of transporter proteins can be determined with a transporter protein functional screen. Functional screening for modulators of transporter proteins comprises contacting at least one test compound with an expression product as aforesaid which is a transporter protein and determining the ability of said test compound to modulate the activity of said transporter protein. The expression product can be part of an intact cell, or lipidic preparation, optionally attached to a support, for example beads, a column or a plate. Binding is preferably performed in the presence of the molecule to be transported, which should only able to pass through a cell membrane or lipidic matrix with the aid of the transporter protein. The molecule to be transported should be able to be followed when it moves into a cell or through a lipidic matrix. Preferably the molecule to be transported is labelled to aid in characterization, e.g. with a chromophore, radioactive, fluorescent, phosphorescent, enzymatic or antibody label. If the molecule to be transported is not directly detectable it should be amenable to detection and quantification by secondary detection, which may employ the above technologies. The molecule to be transported may be contacted with the transporter protein before, simultaneously with or after the test compound. If binding of the test compound to the transporter protein modifies its ability to transport molecules through a membranous or lipidic matrix then the difference between the observed amount of transported molecule in a cell/or through a lipidic matrix relative to the theoretical maximum amount is a reflection of the modulatory effect of the test compound.

[0134] The invention further provides a method for screening compounds for their ability to relieve pain, comprising

[0135] a) contacting at least one test compound in the presence of transporter molecules with a cell containing at least one copy of an expression product of any of the nucleotide sequences of Tables I-X which is a transporter protein or with a lipidic matrix containing at least one copy of the expression product;

[0136] c) measuring the movement of transported molecules into or from the cell, or across the lipidic matrix; and

[0137] d) selecting test compounds on the basis of their ability to modulate the movement of transported molecules.

[0138] f) G-Protein Coupled Receptor Protein Assays

[0139] An expression product of any of the nucleic acid sequences of Tables I-X that encodes a G-protein coupled receptor protein, and in particular any of the nucleic acid sequences listed in Table VI, is amenable to screening using G-protein coupled receptor protein assay technology.

[0140] G-protein coupled receptor proteins (GPCRs) are membrane associated proteins whose main function is to transduce a signal through a cellular membrane. Upon ligand binding, GPCRs undergo a conformational change that allows complexing of the GPCRs with a G-protein. G-proteins possess a GTP/GDP binding site. The formation of the G-protein/ligand complex allows exchange of GTP for GDP, resulting in a conformational change of the G-protein. This conformational change initiates signal transduction.

[0141] Functional screening for modulators of GPCRs comprises contacting at least one test compound with an expression product as aforesaid which is a G-protein coupled receptor protein, and assessing the ability of the test compound(s) to modulate the exchange of GTP for GDP or the modulation of the GPCR signal transduction pathway. The expression product can be part of an intact cell or lipidic preparation, optionally attached to a support, for example beads, a column or a plate. Binding is preferably performed in the presence of a ligand, G-protein and GTP/GDP to allow an assessment of the binding activity of each test compound. Alternatively components of the signalling pathway are also included. In particular, in a preferred embodiment, a labelled GTP is used and the ability of the test compound(s) to modulate the exchange of GTP to GDP is determined. A further optional characteristic of the assay can be the inclusion of a reporter molecule that enables monitoring the regulation of the signalling pathway. The ligand may be contacted with the GPCR before, simultaneously with or after the test compound. Binding of the test compound to the GPCR modifies its ability to modulate the exchange of GTP for GDP and hence the modulation of signal transduction. The difference between the observed amount of GTP exchanged for GDP relative to the theoretical maximum amount of GTP is a reflection of the modulatory effect of the test compound. Likewise the relative activities of signal transduction reporter molecules are also a reflection of the modulatory effect of the test compound. Non limiting examples of technologies and methodologies can be found in Molecular Probes handbook and references therein (Molecular Probes, Inc., 4849 Pitchford Ave, Eugene, USA), Glaxo Pocket Guide to Pharmacology, (Michael Sheehan, Pharmacology Division staff, Glaxo Group Research Ltd., Ware, Herts SC12 ODP) and Xing et al (2000, J. Recept. Signal. Transduct. Res. 20(40 189-210).

[0142] The invention provides a method of screening compounds for their ability to relieve pain, comprising:

[0143] a) contacting at least one test compound in the presence of a ligand, GTP/GDP, G-protein with a cell containing at least one copy of an expression product of any of the nucleotide sequences of Tables I-X which is aG-protein coupled receptor protein or with a lipidic matrix containing at least one copy of the expression product;

[0144] b) measuring the exchange of GTP for GDP, and

[0145] c) selecting test compounds on the basis of their ability to modulate said exchange.

[0146] In the above method, the ligand, GTP/GDP, G-protein and other essential molecules can be added before, simultaneously with or after the contacting of the test compound(s) with the cell line or lipidic matrix in step a).

[0147] g) DNA-Binding Protein Assays

[0148] An expression product of any of the nucleic acid sequences of Tables I-X that encodes a DNA-binding protein, and in particular any of the nucleic acid sequences listed in Table VII, is amenable to screening using DNA-binding protein assay technology.

[0149] DNA binding proteins are proteins that are able to complex with DNA. The complexing of the DNA binding protein with the DNA in some instances requires a specific nucleic acid sequence. Screens can be developed in a similar manner to ligand binding screens as previously indicated and will utilise DNA as the ligand. DNA-binding protein assays can be carried using similar principles described in ligand binding assays as described above. Non limiting examples of methodology and technology can be found in the teachings of Haukanes B I and Kvam C (Biotechnology, Jan. 11, 1993 60-63), Alberts B et al (Molecular Biology of the Cell, 1994, 3^{rd} Edn., Garland Publications Inc, Kirigiti P and Machida C A (2000 Methods Mol Biol, 126, 431-51) and Molecular Probes handbook and references therein (Molecular Probes, Inc., 4849 Pitchford Ave., Eugene, USA).

[0150] The invention therefore includes a method of screening for pain alleviating compounds, comprising:

[0151] a) contacting a test compound or test compounds in the presence of a plurality of nucleic acid sequences with an expression product of any of the nucleotide sequences as set out in Tables I-X which is a DNA binding protein or with cell expressing at least one copy of the expression product or with a lipidic matrix containing at least one copy of the expression product;

[0152] b) determining the binding of the test compound to the expression product, and

[0153] c) selecting test compounds on the basis of their binding abilities.

[0154] In the above method, the plurality of nucleic acid sequence may be added prior to, simultaneously with or after contact of the test compound with the expression product.

[0155] h) Protease Assays

[0156] An expression product of any of the nucleic acid sequencesof Tables I-X that encodes a protease protein, and in particular any of the nucleic acid sequences listed in Table VIII, is amenable to screening using protease protein assay technology. Non-limiting examples of such technologies are illustrated in Molecular Probes handbook and references therein (Molecular Probes, Inc., 4849 Pitchford Ave, Eugene, USA), Cook et al (1992, Structure and function of the aspartic proteinases, Ed. Dunn B M, Plenum Press, New York, 525-528) and Peranteau A G et al (1995, Anal Biochem, 1, 227(1) 242-5).

[0157] Protease proteins have the property of being able to cleave peptide sequences. In brief, one characteristic of the protease-screening assay is the peptide ligand, which may contains at least one copy of a protease protein recognition sequence. The cleavage of this peptide by the protease results in the fragmentation of the peptide ligand. The propensity of the protease to fragment the peptide ligand in the presence of a candidate compound(s) is a measure of the inhibitory qualities of the candidate compound(s).

[0158] The protease-screening assay may be performed in the presence of at least a plurality of ligand binding peptide and a protease. These screening assays can be performed in the presence of isolated expression product, expression product in cells or expression product in a lipidic matrix. The invention therefore includes a method of screening for pain alleviating compounds, comprising:

[0159] (a) contacting one or more test compounds in the presence of peptide ligand with an expression product of any of the nucleotide sequences as set out in Tables I-X which is a protease or with a lipidic matrix containing at least one copy of the expression product;

[0160] (b) determining the amount of cleavage of peptide ligand; and

[0161] (c) selecting test compounds on the basis of their ability to modulate the amount of ligand cleavage.

[0162] j) Assays Using Other Enzymes

[0163] Expression products of any of the nucleic acid sequences of Tables I-X that encode other enzymes, e.g. ligases, lyases, oxidoreductases, transferases and hydrolases, and in particular any of the nucleic acid sequences listed in Table IX, is amenable to screening using appropriate assay technology.

[0164] Each class of enzyme has a defined function. Ligases have the property of being able to splice molecules together. This is achieved with the conversion of ATP substrate to AMP. Therefore, the activity of a ligase can be followed by monitoring the conversion of ATP to AMP. Such technologies are known to those in the art. Non-limiting examples and methodologies can are illustrated by Ghee. T Tan et al (1996, Biochem J. 314, 993-1000, Yang SW et al (1992, 15: 89(6) 2227-31 and references therein, and in Molecular Probes handbook and references therein (Molecular Probes, Inc., 4849 Pitchford Ave, Eugene, USA).

[0165] The invention also provides methods of screening for pain alleviating compounds, comprising;

[0166] a) contacting one or more test compounds in the presence of ATP with an expression product of any of the nucleotide sequences as set out in Tables I-X which is a ligase or with a cell expressing at least 1 copy of an expression product or with a lipidic matrix containing at least 1 copy of an expression product;

[0167] b) determining the amount of ATP converted to AMP, and

[0168] c) selecting test compounds on the basis of their ability to modulate said conversion.

[0169] Lyases are enzymes that catalyze cleavage by reactions other than hydrolysis. These enzymes can be grouped into seven groups according to type of bond cleaved. These groups are carbon-carbon lyases (E.C. No 4.1), carbon-oxygen lyases (E.C. No 4.2), carbon-nitrogen lyases (E.C. No 4.3), carbon-sulphur lyase (E.C. No 4.4) carbon-halide lyases (E.C. No 4.5), phosphorous-oxygen lyases (E.C. No 4.6) and other lyases (E.C. No 4.99) (Analytical Biochemistry 3^{rd} Edn, David J. Holme and Hazel Peck, Longman press). The enzyme commission number (E.C.) of the International Union of Biochemistry relates to the type of reaction catalyzed by the enzyme. Further teachings on how to develop assays and screens for lyases can be obtained from Methods in Enzymology (Academic Press).

[0170] Oxidoreductases are enzymes that catalyze the transfer of hydrogen or oxygen atoms or electrons. These enzymes can by sub-grouped into twenty categories according to their specific mode of action. These groups are oxidoreductases acting on the CH—OH group of donors (E.C. No1.1), oxidoreductases acting on the aldehyde or oxo group of donors (E.C. No 1.2), oxidoreductases acting on the CH—CH group of the donor (E.C. No 1.3), oxidoreductases acting on the CH—NH2 group of donors (E.C. 1.4), oxidoreductases acting on the CH—NH group of donor (E.C. 1.5), oxidoreductases acting on the NADH or NADPH (E.C. No 1.6), oxidoreductases acting on other nitrogen compounds as donors (E.C. No 1.7), oxidoreductases acting on a sulphur group of donors (E.C. No 1.8), oxidoreductases acting on a haem group of donors (E.C. No1.9), oxidoreductases acting on diphenols and related substances as donors (E.C. 1.10), oxidoreductases acting on hydrogen peroxide as acceptor (E.C. No 1.11), oxidoreductases acting on hydrogen as donor (E.C. No 1.12), oxidoreductases acting on single donors with incorporation of molecular oxygen (E.C. No 1.13), oxidoreductases acting on paired donors with incorporation of molecular oxygen (E.C. No 1.14), oxidoreductases acting on superoxide radicals as acceptors (E.C. 1.15), oxidoreductases oxidizing metal ions (E.C. No 1.16), oxidoreductases acting on —CH2 groups (E.C. No 1.17), oxidoreductases acting on reduced ferredoxin as donor (E.C. No 1.18), oxidoreductases acting on reduced flavodoxin as donor (E.C. No 1.19) and other oxidoreductases (E.C. No 1.97) (Analytical Biochemistry 3^{rd} Edn, David J. Holme and Hazel Peck, Longman Press). The enzyme commission number (E.C.) of the International Union of Biochemistry relates to the type of reaction catalysed by the enzyme. Further teachings on how to develop assays and screens for oxidoreductases can be obtained from Methods in Enzymology (Academic Press) with special reference to volume 249.

[0171] Transferases are enzymes that catalyze the transfer of specific groups. They are classified into eight sub groups according to function, transferring one-carbon group (E.C. No 2.1), Transferring aldehyde or ketonic residues (E.C. No 2.2), Acetyltransferases (E.C. 2.3), glycosyltransferases (E.C. No 2.4), transferring alkyl or aryl groups other than methyl groups (E.C. No 2.5), transferring nitrogenous groups (E.C. No 2.6), transferring phosphorous-containing groups (E.C. No 2.7) and transferring sulphur-containing groups (E.C. No 2.8) (Analytical Biochemistry 3^{rd} Edn, David J. Holme and Hazel Peck, Longman Press). The enzyme commission number (E.C.) of the International Union of Biochemistry relates to the type of reaction catalyzed by the enzyme. Further teachings on how to develop assays and screens for transferases can be obtained from Methods in Enzymology (Academic Press).

[0172] Hydrolases are enzymes that catalyze hydrolytic reactions and are sub-grouped into eleven classes according to the type of reaction they carry out. Hydrolases acting on ester bonds (E.C. No 3.1), hydrolases acting on glycosyl compounds (E.C. No 3.2), hydrolases acting on ether bonds (E.C. No 3.3), hydrolases acting on peptide bonds (E.C. No 3.4), hydrolases acting on carbon-nitrogen bonds, other than peptide bonds (E.C. No 3.5), hydrolases acting on acid anhydrides (E.C. No 3.6), hydrolases acting on acid anhydrides (E.C. No 3.6), hydrolases acting on carbon-carbon bonds (E.C. No 3.7), hydrolases acting on halide bonds (E.C. No 3.8), hydrolases acting on phosphorous-nitrogen bonds (E.C. No 3.9), hydrolases acting on sulphur-nitrogen bonds (E.C. No 3.10) and hydrolases acting on carbon-phosphorous bonds (Analytical Biochemistry 3 Edn, David J. Holme and Hazel Peck, Longman Press). The enzyme commission number (E.C.) of the International Union of Biochemistry relates to the type of reaction catalyzed by the enzyme. Further teachings on how to develop assays and screens for hydrolases can be obtained from Methods in Enzymology (Academic Press) with special reference to volume 249.

[0173] C) In vivo Functional Screen

[0174] Any of the nucleic acid sequences described in Tables I-X or homologues thereof may be inserted by means of an appropriate vector into the genome of a lower vertebrate or of an invertebrate animal or may be inactivated or down regulated in the genome of said animal. The resulting genetically modified animal may be used for screening compounds for effectiveness in the regulation of pain. The invertebrate may, for example, be a nematode e.g. Caenorhabditis elegans, which is a favourable organism for the study of response to noxious stimuli. Its genome sequence has been determined, see Science, 282, 2012 (1998), it can be bred and handled with the speed of a micro-organism (it is a self-fertilizing hermaphrodite) and can therefore be used in a high throughput screening format (WO 00/63424, WO 00/63425, WO 00/63426 and WO 00/63427), and it offers a full set of organ systems, including a simple nervous system and contains many similarly functioning genes and signaling pathways to mammals. A thermal avoidance model based on a reflexive withdrawal reaction to an acute heat stimulus has been described by Wittenburg et al, Proc. Natl. Acad. Sci. USA, 96, 10477-10482 (1999), and allows the screening of compounds for the treatment of pain with the modulation of pain sensation as an endpoint.

[0175] The genome of C. elegans can be manipulated using homologous recombination technology which allows direct replacement of nucleic acids encoding C. elegans with their identified mammalian counterpart. Replacement of these nucleic acids with those nucleic acids outlined above would allow for the direct screening of test compound(s) with their expression products. Any of the pain-related genes described above may be ligated into a plasmid and introduced into oocytes of the worm by microinjection to produce germline transformants. Successful plasmid injection into C. elegans and expression of inserted sequences has been reported by Devgen B. V., Ghent, Belgium. It is also possible to produce by routine methods worms in which the target sequences are down-regulated or not expressed (knock-out worms). Further non limiting examples of methodology and technology can be found in the teachings of Hazendonk et al (1997, Nat genet. 17(1) 119-21), Alberts et al, (1994, Molecular Biology of the Cell 3^{rd} Ed. Garland Publishing Inc, Caenorhabditis elegans is anatomically and genetically simple), Broverman Set al, (1993, PNAS USA 15; 90(10) 4359-63) and Mello et al (1991, 10(12) 3959-70).

[0176] A further method for screening compounds for ability to modify response to pain, e.g. relieve pain, comprises:

[0177] (a) contacting one or more test compounds with at least one C elegans containing at least one copy of a sequence as set out above;

[0178] (b) subjecting the C. elegans to a nociceptive stimulus;

[0179] (c) observing the response of the C. elegans to said stimulus; and

[0180] d) selecting test compounds on the basis of their ability to modify the response of C. elegans to said stimulus.

[0181] Diagnostic Tools and Kits

[0182] Affinity Peptides, Ligands and Substrates

[0183] Pain associated polypeptides and fragments thereof can be detected at the tissue and cellular levels with the use of affinity peptides, ligands and substrates, which will enable a skilled person to define more precisely a patient's ailment and help in the prescription of a medicament. Such affinity peptides are characterized in that firstly they are able to bind specifically to a pain associated polypeptide, and secondly that they are capable of being detected. Such peptides can take the form of a peptide or polypeptide for example an antibody domain or fragment, or a peptide/polypeptide ligand or substrate, or a polypeptide complex such as an antibody.

[0184] The preparation of such peptides and polypeptides are known to those in the art. Antibodies, these may be polyclonal or monoclonal, and include antibodies derived from immunized animals or from hybridomas, or derivatives thereof such as humanized antibodies, Fab or F(ab′)₂ antibody fragments or any other antibody fragment retaining the antigen binding specificity.

[0185] Antibodies directed against pain-associated gene product molecules may be produced according to conventional techniques, including the immunization of a suitable mammal with the peptides or polypeptides or fragment thereof. Polyclonal antibodies can be obtained directly from the serum of immunized animals. Monoclonal antibodies are usually produced from hybridomas, resulting from a fusion between splenocytes of immunized animals and an immortalized cell line (such as a myeloma). Fragments of said antibodies can be produced by protease cleavage, according to known techniques. Single chain antibodies can be prepared according to the techniques described in U.S. Pat. No. 4,946,778. Detection of these affinity peptides could be achieved by labelling. Technologies which allow detection of peptides, such as enzymatic labelling, fluorescence labelling or radio-labelling are well known to those in the art. Optionally these affinity peptides, ligands and substrates could themselves be detected with the use of a molecule that has specific affinity to the peptides, ligands and substrates and is itself labelled.

[0186] The invention further provides a kit, which comprises;

[0187] (a) affinity peptide and/or ligand and/or substrate for an expression product of a gene sequence that is up-regulated in the spinal cord of a mammal in response to streptozocin-induced diabetes; and

[0188] (b) a defined quantity of an expression product of a gene sequence that is up-regulated in the spinal cord of a mammal both in response to streptozocin-induced diabetes, for simultaneous, separate or sequential use in detecting and/or quantifying an expression product of a gene sequence that is up-regulated in the spinal cord of a mammal in response to streptozocin-induced diabetes

[0189] Complimentary Nucleic Acids

[0190] Pain associated nucleic acid sequences can be characterized at the tissue and cellular levels with the use of complimentary nucleic acid sequences. Detection of the level of expression of pain associated nucleic acid sequences can help in the prognosis of a pain condition and the prescription of a medicament. These complimentary nucleic acids are characterized in that they can hybridize to a pain associated nucleic acid sequence and their presence can be detected through various techniques. Such techniques are known to those in the art and may include detection by polymerase chain reaction or detection by labelling of complimentary nucleic acid sequences by enzymatic labelling, affinity labelling fluorescent labelling or radio-labelling. Complimentary strand nucleic acid sequences of this invention are 10 to 50 bases long, more preferably 15 to 50 bases long and most preferably 15 to 30 bases long, and hybridize to the coding sequence of the nucleic acid sequence.

[0191] A further aspect of this invention is a kit that comprises:

[0192] (a) nucleic acid sequences capable of hybridization to a nucleic acid sequence that is up-regulated in the spinal cord of a mammal in response streptozocin-induced diabetes and

[0193] (b) a defined quantity of one or more nucleic acid sequences capable of hybridization to a nucleic acid sequence that is up-regulated in the spinal cord of a mammal in response to streptozocin-induced diabetes, for simultaneous, separate or sequential use in detecting and/or quantifying a gene sequence that is up-regulated in the spinal cord of a mammal in response to streptozocin-induced diabetes.

[0194] Identification and Validation

[0195] Subtractive hybridization enables the identification of nucleic acid sequences whose expression profiles are modified by a stimulus. Upon stimulation of a system (in the case of this invention a nociceptive stimulus on an animal model) all observed changes in the level of nucleic acid sequence expression are due to the reaction of the system to the stimulus. Characterization of these changes in expression by way of identification of nucleic acid sequence and level of expression is both identification and validation.

[0196] The inventors have developed a four step process which allows for the simultaneous identification and validation of nucleic acid sequences whose expression are regulated by a pain stimulus, preferably a chronic pain stimulus, and more preferably a diabetic pain stimulus. This process may comprise the following steps:

[0197] (a) induction of a nociceptive stimulus in test animals;

[0198] (b) extraction of nucleic acids from specific neuronal tissue of test and control animals;

[0199] (c) selective amplification of differentially expressed nucleic acid sequences; and

[0200] (d) identification and characterization of differentially expressed gene products that are modulated by a nociceptive stimulus.

[0201] The above process is described in more detail below.

[0202] (a) Induction of Nociceptive Stimulus

[0203] The effect of the selected nociceptive stimulus on the test animal needs to be confirmable. The test subjects are therefore a species that has a “developed” nervous system, preferably similar to that of humans, most preferably rats or mice. Advantageously, the nociceptive stimulus is analogous to known pain paradigms in humans. One such paradigm of pain which is used herein is the pain associated with diabetes, which can be induced in rodents with the use of streptozotocin (STZ). However, other pain paradigms could be used.

[0204] Streptozotocin (STZ) induces hyperglycemia and Type 1 diabetes mellitus in rats. In particular, STZ contains a glucose analogue that allows it to be taken up by the glucose transporter 2 present on the surface of pancreatic β cells, the site of insulin synthesis. Once inside the cell, STZ causes a reduction in the level of nicotinamide adenine dinucleotide (NAD⁺). The decrease in NAD⁺ levels eventually leads to necrosis of the pancreatic β cell, causing a reduction in insulin levels and then diabetes, leading to neuropathy (diabetic) and neuropathic pain (R. B. Weiss, Cancer Treat. Rep., 66, 427-438 1982, Guy et al, Diabetologica, 28, 131-137 1985; Ziegler et al, Pain, 34, 1-10 1988; Archer et al, J Neural. Neurosurgeon. Psychiatry, 46, 491-499 1983). The diabetic rat model has been shown to be a reliable model of hyperalgesia. We have used an STZ-induced diabetic rat model to create a state of hyperlagesia that can be compared with control animals (Courteix et al, Pain, 53, 81-88 1993).

[0205] (b) Extraction of Nucleic Acids from Neuronal Tissue of Test and Control Animals

[0206] The inventors have determined that RNA extraction of whole spinal cord nervous tissue provides a way of identifying nucleic acid sequences whose expression is modulated by streptozotocin induced pain. Test (subjected to the nociceptive stimulus) and control animals were sacrificed, and the tissue to be studied e.g. neural tissue separated. Techniques for so doing vary widely from animal to animal and will be familiar to skilled persons.

[0207] A cDNA library can be prepared from total RNA extracted from neural tissue of the test and control animals. Where possible, however, it is preferred to isolate the mRNA from the total RNA of the test and control animals, by affinity chromatography on oligo (dT)-cellulose, and then reverse transcribe the mRNA from the test and control animals to give test and control cDNA. Converting mRNA from the test and control animals to corresponding cDNA may be carried out by any suitable reverse transcription method, e.g. a method described by Gubler & Hoffman, Gene, 25, 263-269 (1983). If desired a proprietary kit may be used e.g. the CapFinder PCR cDNA Library Construction Kit (Life Technologies) which is based on long-distance PCR and permits the construction of cDNA libraries from nanograms of total RNA.

[0208] (c) Selective Amplification of Differentially Expressed Nucleic Acids

[0209] The reverse transcribed cDNA of the test and control animals is subjected to subtractive hybridisation and amplification so that differentially expressed sequences become selectively amplified and commonly expressed sequences become suppressed, so as to over-produce DNA associated with said nociceptic stimulus. A wide range of subtractive hybridisation methods can be used, but the preferred method is so-called suppression subtractive hybridisation, see U.S. Pat. No. 5,565,340 and Diatchenko et al, Proc. Nat. Acad. Sci. USA, 93, 6025-6030 (1996), the disclosures of which are herein incorporated by reference. Kits for carrying out this method are available from CLONTECH Laboratories, Inc.

[0210] (d) Cloning and Sequencing the Differentially Expressed cDNA

[0211] The differentially expressed cDNA is ligated into a cloning vector, after which cells of E. coli are transformed with the vector and cultured. Positive clones are selected and burst to release plasmids containing the cDNA insert. The plasmids are primed using forward and reverse primers to either side of the cloning site and the cDNA insert is sequenced. Vector and adaptor sequences are then removed from the output data from the sequencer, leaving only the nucleotide sequence of the differentially expressed gene. The sequence is then checked against data held in a database for homology to known nucleotide sequences and genes and including expressed sequence tags (ESTs) and coding sequences for proteins.

[0212] (e) Validation of the above Method

[0213] The importance of the sequences that we have identified in pain is confirmed by the fact that genes that represent nucleic acid sequences which have previously been implicated in pain, including Calmodulin (PRCM1, Genebank X13933), Enkephalin (Genebank Y07503) and Neurotensin receptor type 2 (Genebank X97121) have also been identified using this method.

[0214] The inventors have identified nucleic acid sequences of the MAP kinase pathway, a previously non pain-associated biological pathway. The inventors have subsequently shown that intra-spinal injection of a MEK inhibitor (MEK is part of the MAP kinase pathway) produces a powerful inhibition of pain (Patent application No U.S. 60/144,292). Subsequently, it has been shown that the MAP kinase is also implicated in acute inflammatory pain (Woolf et al, Nature Neuroscience 1999).

[0215] The invention will now be further described in the following Example.

### EXAMPLE

[0216] Induction of Diabetes

[0217] Diabetes was induced in adult (150-200 g) male Sprague-Dawley rats (n=6) as described by Courteix et al (supra). Animals were injected intraperitoneally with streptozotocin (STZ)(50 mg/kg) dissolved in distilled water. Control or sham animals (age-matched animals, n=6) were injected with distilled water only. Nociceptive testing Static allodynia (a form of hyperlagesia) was measured using a method described by Chaplan let al, “Quantitative assessment of tactile allodinya in the rat paw”, J. Neurosci. Methods, 53, 55-63 (1994). A series of von Frey filaments of different buckling weight (i.e. the load required for the filament to bend) were applied to the plantar surface of the right hand paw. The starting filament had a buckling weight of 20 g. Lifting of the paw was taken to be a positive result, in which case a filament with the next lowest buckling weight was used for the next measurement. The test was continued until a filament was found for which there was an absence of response for longer than 5 seconds whereas a re-test with the next heaviest filament gave a positive response. Animals were considered hyperalgesic if their thresholds were found to be<4 g of those of comparable untreated rats, see Calcutt & Chaplan, “Spinal pharmacology of tactile allodynia in diabetic rats”, British J. Pharmacol, 122, 1478-1482 (1997).

[0218] Tissue Extraction

[0219] STZ-treated and control animals were anaesthetized with 4% halothane and perfused with ice-cold 0.9% saline containing 1% citric acid (pH adjusted to 7.4 with NaOH). The animals were decapitated and the lumbar spinal cord exposed. A 2-centimetre length of spinal cord ending at L6 (lumbar-6 forward) was removed from the spinal column. Attached dorsal root ganglia and contaminating spinal connective tissues were removed. The spinal cord tissue was snap frozen in dry ice and isopentane.

[0220] Total RNA Extraction

[0221] Total RNA was extracted from the above pooled male rat tissues using the TRIZOL Reagent Kit (Life Technologies). Briefly, tissue samples were homogenised fully using a Polytron homogenizer in 1 ml of TRIZOL reagent per 50-100 mg of tissue.

[0222] Homogenized samples were then incubated at room temperature for 5 minutes and phase separated using 0.2 ml chloroform per 1 ml TRIZOL reagent followed by centrifugation at 3,000 g. The aqueous phase was transferred to a fresh tube and the RNA precipitated with an equal volume of isopropyl alcohol and followed by centrifugation at 10,000 g. The RNA pellet was washed in 75% ethanol and re-centrifuged. The pellet was then air dried and re-suspended in water.

[0223] mRNA Extraction

[0224] In contrast to ribosomal RNA and transfer RNA, the vast majority of mRNAs of mammalian cells carry tracts of poly(A⁺) at their 3′ termini. mRNAs can therefore be separated from the bulk of cellular RNA by affinity chromatography on oligo (dT)-cellulose. mRNA was extracted from Total RNA using the MESSAGEMAKER Kit (Life Technologies) in which mRNA (previously heated to 65° C. in order to disrupt secondary structures and so expose the poly (A⁺) tails) was bound to oligo(dT) cellulose under high salt concentrations (0.5M NaCl) in a filter syringe. Unbound RNA was then washed away and the poly(A⁺) mRNA eluted in distilled water. A tenth of the volume of 7.5 M Ammonium Acetate, 50 μg of glycogen/ml mRNA sample and 2 volumes of absolute alcohol were then added to the samples which are then placed at −20° C. overnight. Following precipitation, the mRNA was spun down at 12,000 g for 30 minutes at 4° C. RNAase free water was used to re-suspend the pellets, which were then and stored at −80° C.

[0225] PCR Select

[0226] The technique used was based on that of the CLONTECH PCR Select Subtraction Kit. The following protocol was performed using STZ-treated lumbar spinal cord Poly A⁺ RNA as the ‘Tester’ and Sham lumbar spinal cord poly A⁺ RNA as the ‘Driver’ (Forward Subtraction). A second subtraction experiment using the Sham lumbar spinal cord mRNA as the ‘Tester’ and STZ treated lumbar spinal cord mRNA as the ‘Driver’ (Reverse Subtraction) was performed in parallel using the same reagents and protocol. As a control for both experiments, the subtraction was also carried out using human skeletal muscle mRNA that had been provided by the kit manufacturer.

[0227] First-Strand cDNA Synthesis

[0228] 2 μg of PolyA⁺ RNA and 1 l of cDNA synthesis primer (10 μM) were combined in a 0.5 ml Eppendorf tube and sterile H₂O was added where necessary to achieve a final volume of 5 μl. The contents were mixed gently and incubated in a thermal cycler at 70° C. for 2 min. The tubes were then cooled on ice for two minutes, after which 2 μl of 5×First-strand buffer, 1 μl of dNTP mix (10 mM each), sterile H₂O and 1 μl of AMV reverse transcriptase (20 units/μl) was also added. The tubes were then placed at 42° C. for 1.5 hr in an air incubator. First-strand cDNA synthesis was terminated by placing the tubes on ice. (the human skeletal muscle cDNA produced by this step was used as the ‘control driver’ in later steps).

[0229] Second-Strand cDNA Synthesis

[0230] 48.4 l of Sterile H₂O, 16.0 μl of 5×Second-strand buffer, 1.6 μl of dNTP mix (10 mM) and 4.0 μl of 20×second-strand enzyme cocktail were added to each of the first-strand synthesis reaction tubes. The contents were then mixed and incubated at 16° C. in a thermal cycler for 2 hr. 6 units (2 μl) of T4 DNA polymerase was then introduced and the tubes were incubated for a further 30 min at 16° C. In order to terminate second-strand synthesis, 4 μl of 20×EDTA/glycogen mix was added. A phenol:chloroform extraction was then carried out using the following protocol:

[0231] 100 μl of phenol:chloroform:isoamyl alcohol (25:24:1) was added to the tubes which were then vortexed thoroughly and centrifuged at 14,000 rpm for 10 min at room temperature. The top aqueous layer was removed and placed in a fresh tube. 100 μl of chloroform:isoamyl alcohol (24:1) was then added to the aqueous layer and the tubes were again vortexed and centrifuged at 14,000 rpm for 10 min. 40 μl of 4 M NH₄OAc and 300 μl of 95% ethanol were then added and the tubes centrifuged at 14,000 rpm for 20 min. The supernatant was removed carefully, then 500 μl of 80% ethanol was added to the pellet. The tubes were centrifuged at 14,000 rpm for 10 min and the supernatant was removed so that the pellet could be air-dried. The precipitate was then dissolved in 50 μl of H₂O. 6 μl was transferred to a fresh microcentrifuge tube. The remainder of the sample was stored at −20° C. until needed.

[0232] Rsa I Digestion

[0233] All products of the above procedures were subjected to a restriction digest, using the restriction endonuclease Rsa I, in order to generate ds cDNA fragments that are short and thus are optimal for subtraction hybridisation due to the standard kinetics of the hybridisation. Also, as Rsa I makes a double stranded cut in the middle of a recognition sequence, ‘blunt ends’ of a known nucleotide sequence are produced allowing ligation of adaptors onto these ends in a later step. The following reagents were added to the 6 μl product of the second hybridisation (see above): 43.5 μl of ds cDNA, 5.0 μl 10×Rsa I restriction buffer and 1.5 μl of Rsa I (10 units/μl). The reaction mixture was incubated at 37° C. for 1.5 hr. 2.5 μl of 20×EDTA/glycogen mix was used to terminate the reaction. A phenol:chloroform extraction was then performed as above (second-strand cDNA synthesis section). The pellet produced was then dissolved in 5.5 μl of H₂O and stored at −20° C. until needed. The preparation of the experimental ‘Driver’ cDNAs and the control skeletal muscle cDNA was thus completed.

[0234] Adaptor Ligation

[0235] The adaptors were not ligated to the driver cDNA.

[0236] 1 μl of each Rsa I-digested experimental cDNA (from the Rsa I Digestion above) was diluted with 5 μl of sterile water. Preparation of the control skeletal muscle tester cDNA was then undertaken by briefly centrifuging the tube containing control DNA (Hae III-digest of φX174 DNA [3 ng/μl]) and diluting 2 μl of the DNA with 38 μl of sterile water (to 150 ng/ml). 1 μl of control skeletal muscle cDNA (from the Rsa I Digestion) was then mixed with 5 μl of the diluted φX174/Hae III DNA (150 ng/ml) in order to produce the control skeletal muscle tester cDNA.

[0237] Preparation of the Adaptor-Ligated Tester cDNA

[0238] A ligation master mix was prepared by combining 3 μl of sterile water, 2 μl of 5×ligation buffer and 1 μl T4 DNA ligase (400 units/μl) per reaction. 2 μl of adaptor 1 (10 μM) was then added to 2 μl of the diluted tester cDNA. To this, 6 μl of the ligation master mix was also added. The tube was therefore labelled Tester 1-1. In a separate tube, 2 μl of the adaptor 2R (10 μM) was mixed with 2 μl of the diluted tester cDNA and 6 μl of the master mix. This tube was named Tester 1-2.

[0239] 2 μl of Tester 1-1 and 2 μl of Tester 1-2 were then placed into fresh tubes. These would later be used as the unsubtracted tester control. The remainder of the contents of Tester 1-1 and Tester 1-2 tubes were then centrifuged briefly and incubated at 16° C. overnight. The ligation reaction was stopped by adding 1 l of EDTA/glycogen mix and the samples were heated at 72° C. for 5 min in order to inactivate the ligase. In doing so, preparation of the experimental and control skeletal muscle adaptor-ligated tester cDNAs was complete.

[0240] 1 μl from each unsubtracted tester control was then removed and diluted into 1 ml of water. These samples were set aside as they were to be used later for PCR (see below). All of the samples were stored at −20° C.

[0241] Analysis of Ligation Efficiency

[0242] 1 μl of each ligated cDNA was diluted into 200 μl of water and the following reagents were then combined in four separate tubes:

Tube:

| Component | 1 | 2 | 3 | 4 |
|---|---|---|---|---|
| Tester 1-1 (ligated to Adaptor 1) | 1 | 1 | — | — |
| Tester 1-2 (ligated to Adaptor 2R) | — | — | 1 | 1 |
| G3PDH 3′ primer (10 μM) | 1 | 1 | 1 | 1 |
| G3PDH 5′ primer (10 μM) | — | 1 | — | 1 |
| PCR primer 1 (10 μM) | 1 | — | 1 | — |
| Total volume μl | 3 | 3 | 3 | 3 |

[0243] A master mix for all of the reaction tubes plus one additional tube was made up by adding 18.5 μl of sterile H₂O, 2.5 μl of 10×PCR reaction buffer, 0.5 μl of dNTP mix (10 mM), and 0.5 μl of 50×Advantage cDNA Polymerase Mix, per reaction, into a fresh tube. 22 μl of this master mix was then aliquotted into each of the 4 reaction tubes prepared above. The contents of the tubes were overlaid with 50 μl of mineral oil. The reaction mix was incubated in a thermal cycler at 75° C. for 5 min in order to extend the adaptors. The following protocol was then carried out immediately in a thermal cycler (Perkin-Elmer GeneAmp PCR Systems 2400): 94° C. for 30 sec (1 cycle), 94° C. 10 sec, 65° C. 30 sec and then 68° C. 2.5 min (25 cycles)

[0244] First Hybridisation

[0245] 1.5 μl of the Adaptor 1-ligated Tester 1-1 was combined with 1.5 μl of the Rsa I-digested driver cDNA, prepared earlier and 1 μl of 4×Hybridisation buffer. This process was then repeated combining the Adaptor 2R-ligated Tester 1-2 with the Rsa I-digested driver cDNA and 4×Hybridisation buffer. The samples were incubated in a thermal cycler at 98° C. for 1.5 min followed by incubation at 68° C. for 8 hr.

[0246] Second Hybridisation

[0247] 1 μl of Driver cDNA (i.e. the Rsa I-digested cDNA (see above)), 1 μl 4×Hybridisation buffer and 2 μl Sterile H₂O were all combined in a fresh tube. 1 μl of this mix was then removed and placed in a new tube, overlaid with 1 drop of mineral oil and incubated at 98° C. for 1.5 min in order to denature the driver. The following procedure was used to simultaneously mix the driver with hybridisation samples 1 and 2 (prepared in the first hybridisation), thus ensuring that the two hybridisation samples were mixed together only in the presence of freshly denatured driver: A micropipetter was set at 15 μ. The pipette tip was then touched onto the mineral oil/sample interface of the tube containing hybridisation sample 2. The entire sample was drawn partway into the tip before it was removed from the tube in order to draw a small amount of air into the tip. The pipette tip was then touched onto the interface of the tube containing the freshly denatured driver (i.e. the tip contained both samples separated by a small pocket of air) before the entire mixture was transferred to the tube containing hybridisation sample 1. The reaction was then incubated at 68° C. overnight. 200 μl of dilution buffer was added to the tube, which was then heated in a thermal cycler at 68° C. for 7 min. The product of this second hybridisation was stored at −20° C.

[0248] PCR Amplification

[0249] Seven PCR reactions were set up: (1) The forward-subtracted experimental cDNA, (2) the unsubtracted tester control (see preparation of the adaptor ligated tester cDNA), (3) the reverse-subtracted experimental cDNA, (4) the unsubtracted tester control for the reverse subtraction, (5) the subtracted control skeletal muscle cDNA, (6) the unsubtracted tester control for the control subtraction, and (7) the PCR control subtracted cDNA (provided in the kit). The PCR control subtracted cDNA was required to provide a positive PCR control as it contained a successfully subtracted mixture of Hae III-digested φX174 DNA.

[0250] The PCR templates were prepared by aliquotting 1 μl of each diluted cDNA (i.e., each subtracted sample from the second hybridisation and the corresponding diluted unsubtracted tester control produced by the adaptor ligation see above) into an appropriately labelled tube. 1 μl of the PCR control subtracted cDNA was placed into a fresh tube. A master mix for all of the primary PCR tubes, plus one additional reaction, was then prepared by combining 19.5 μl of sterile water, 2.5 μl of 10×PCR reaction buffer, 0.5 μl of dNTP Mix (10 mM), 1.0 μl of PCR primer 1 (10 μM) and 0.5 μl of 50×Advantage cDNA Polymerase Mix. 24 μl of Master Mix was then aliquotted into each of the 7 reaction tubes prepared above and the mixture was overlaid with 50 μl of mineral oil, before being incubated in a thermal cycler at 75° C. for 5 min in order to extend the adaptors. Thermal cycling was then immediately started using the following protocol: 94° C. 25 sec (1 cycle), 94° C. 10 sec, 66° C. 30 sec and 72° C. 1.5 min (32 cycles). 3 μl of each primary PCR mixture was then diluted in 27 μl of H₂O, 1 μl of each of these dilutions was then placed into a fresh tube.

[0251] A master mix for the secondary PCRs, (plus an additional reaction) was set up by combining 18.5 μl of sterile water, 2.5 μl of 10×PCR reaction buffer, 1.0 μl of Nested PCR primer 1 (10 μM), 1.0 μl of Nested PCR primer 2R (10 μM), 0.5 μl of dNTP Mix (10 mM) and 0.5 μl of 50×Advantage cDNA Polymerase Mix per reaction. 24 μl of this Master Mix was then added into each reaction tube containing the 1 μl diluted primary PCR mixture. The following PCR protocol was then carried out: 94° C. 10 sec, 68° C. 30 sec and 72° C. 1.5 min (12 cycles). The reaction products were then stored at −20° C.

[0252] Ligation into a Vector/Transformation & PCR

[0253] The products of the PCR amplification (enriched for differentially expressed cDNAs) were ligated into the pCR2.1-TOPO vector using a T/A cloning kit (Invitrogen), transformed into TOPO One Shot competent cells according to the manufacturers protocol and grown up on LB (Luria-Bertani) Agar plates overnight at 37° C. 1,000 colonies were then individually picked (using fresh sterile tips) and dipped into 5 μl of sterile water which had been aliquotted previously into 96 well PCR plates. The water/colonies were heated in a thermal cycler at 100° C. for 10 minutes in order to burst the cells, thus releasing the plasmids containing a differentially expressed cDNA insert. The 5 μl of water/plasmid was then used as a template in a PCR reaction (see below) using M13 Forward and Reverse primers (10 ng/μl), complementary to the M13 site present on either side of the cloning site on the vector. 5 μl of the PCR product was then run on a 2% agarose gel and stained by ethidium bromide. PCR products of an amplified insert were identified and 5 μl of the remainder of the PCR product (i.e. from the 15 μl that had not been run on the gel) was diluted 1/10 with water. 5 μl of the diluted PCR product was then used as a template in a sequencing reaction.

[0254] Sequencing

[0255] A sequencing reaction containing M13 primer (3.2 pmol/μl), ‘BigDye’ reaction mix (i.e. AmpliTaq® DNA polymerase, MgCl₂, buffer and fluorescent dNTPs [each of the four deoxynucleoside triphosphates is linked to a specific fluorescent donor dye which in turn is attached to a specific acceptor dye]) and cDNA template (diluted PCR product) was set up. The reaction was carried out on a thermal cycler for 25 cycles of 10 seconds at 96° C., 20 seconds at 50° C. and 4 minutes at 60° C. Each reaction product was then purified through a hydrated Centri-Sep column, and lyophilised. The pellets were resuspended in Template Suppression Reagent and sequenced on an ABI Prism 310 Genetic Analyser. The analyser uses an ion laser to excite the specific donor dye that transfers its energy to the acceptor dye, which emits a specific energy spectrum that can be read by the sequencer.

[0256] The first 150 potentially upregulated genes were sequenced at Parke-Davis, Cambridge. The remaining 877 from both the forward and back subtractions were sequenced at the applicant's core sequencing facility in Ann Arbor, Mich., USA.

[0257] Bioinformatics

[0258] The sequencing results were analysed using the computer program CHROMAS in which the vector and adaptor sequences were clipped off, leaving only the nucleotide sequence of the differentially expressed gene. Each sequence was then checked for homology to known genes, Expressed Sequence Tags (ESTs) and Proteins using various Basic Local Alignment Search Tool (BLAST) searches against the Genbank sequence database at the National Centre for Biotechnology Information, Bethesda, Md., USA (NCBI).

[0259] Two lists were derived called STZup and STZdown that contain the nucleic acid sequences from the forward and back subtracted libraries respectively. In each list there are given accession numbers and descriptions for the known rat genes identified, and where available corresponding mouse or human genes. Sequences that are considered to be of interest are listed in Tables I-IX above.

[0260] References have been given where available for the sequences that have been found, and sequence listings have been given in the form in which they currently appear in publicly searchable databases e.g. the NCBI databaase (National Center for Biotechnology Information, National Library of Medicine, National Institutes of Health, Bethesda, Md., MD 20894, USA, www.ncbi.nlm.nih.gov). These sequence listings are given for the purposes of identification only. The invention includes the use of subsequently revised versions of the above sequences (which may incorporate small differences to the version set out herein) and homologous sequences or similar proteins in other species as determined by a high percentage identity (e.g. above 50%, preferably above 90%), length of alignment and functional equivalence.

### REFERENCES (Tables I-X)

[0261] 1. Nakagawa, T., Goto, K. and Kondo, H., Cloning and characterization of a 92 kDa soluble phosphatidylinositol 4-kinase, Biochem. J,. 320 (Pt 2), 643-649 (1996).

[0262] 2. Leung, T., Manser, E., Tan, L. and Lim, L., A novel serine/threonine kinase binding the Ras-related RhoA GTPase which translocates the kinase to peripheral membranes, J. Biol. Chem. 270 (49), 29051-29054 (1995); Leung, T., Chen, X. Q., Manser, E. and Lim, L., The pl60 RhoA-binding kinase ROK alpha is a member of a kinase family and is involved in the reorganization of the cytoskeleton, Mol. Cell. Biol. 16 (10), 5313-5327 (1996).

[0263] 3. Ahmed, K., Davis, A., Hanten, J., Lambert, D., Mclvor, R. S. and Goueli, S. A., Cloning of cDNAs encoding the alpha and beta subunits of rat casein kinase 2 (CK-2): Investigation of molecular regulation of CK-2 by androgens in rat ventral prostate, Cell. Mol. Biol. Res. 39, 451-462 (1993).

[0264] 4. Boulton, T. G., Nye, S. H., Robbins, D. J., Ip, N.Y., Radziejewska, E., Morgenbesser, S. D., DePinho, R. A., Panayotatos, N., Cobb, M. H. and Yancopoulos, G. D., ERKs: A family of protein-serine/threonine kinases that are activated and tyrosine phosphorylated in response to insulin and NGF, Cell 65, 663-675 (1991).

[0265] 5. Middlemas, D. S., Lindberg, R. A. and Hunter, T., trkB, a neural receptor protein-tyrosine kinase: evidence for a full-length and two truncated receptors, Mol. Cell. Biol. 11, 143-153 (1991).

[0266] 6. Carter, D. A., Expression of a novel rat protein tyrosine phosphatase gene, Biochim. Biophys. Acta 1442 (2-3), 405-408 (1998).

[0267] 7. Kuno, T., Takeda, T., Hirai, M., Ito, A., Mukai, H. and Tanaka, C., Evidence for a second isoform of the catalytic subunit of calmodulin-dependent protein phosphatase (calcineurin A), Biochem. Biophys. Res. Commun. 165, 1352-1358 (1989).

[0268] 8. Bolger, G. B., Rodgers, L. and Riggs, M., Differential CNS expression of alternative mRNA isoforms of the mammalian genes encoding cAMP-specific phosphodiesterases, Gene 149 (2), 237-244 (1994).

[0269] 9. Chalon, P., Vita, N., Kaghad, M., Guillemot, M., Bonnin,J., Delpech, B., Le Fur, G., Ferrara, P. and Caput, D., Molecular cloning of a levocabastine-sensitive neurotensin binding site, FEBS Lett., 386 (2-3), 91-94 (1996).

[0270] 10. Greenfeder S. A., Nunes, P., Kwee, L., Labow, M., Chizzonite, R. A. and Ju, G., Molecular cloning and characterization of a second subunit of the interleukin 1 receptor complex, J. Biol. Chem. 270 (23), 13757-13765 (1995).

[0271] 11. Sugawara, M., Nakanishi, T., Fei, Y. J., Huang, W., Ganapathy, M. E., Leibach, F. H. and Ganapathy, V., Cloning of an amino acid transporter with functional characteristics and tissue expression pattern identical to that of system A, J. Biol. Chem. 275 (22), 16473-16477 (2000).

[0272] 12. Noe, B., Hagenbuch, B., Stieger, B. and Meier, P. J., Isolation of a multispecific organic anion and cardiac glycoside transporter from rat brain, Proc. Natl. Acad. Sci. U.S.A. 94 (19), 10346-10350 (1997).

[0273] 13. Feany, M. B., Lee, S., Edwards, R. H. and Buckley, K. M., The synaptic vesicle protein SV2 is a novel type of transmembrane transporter, Cell 70, 861-867 (1992).

[0274] 14. Borowsky, B., Mezey, E. and Hoffman, B. J., Two glycine transporter variants with distinct localization in the CNS and peripheral tissues are encoded by a common gene, Neuron 10 (5), 851-863 (1993).

[0275] 15. Gedeon, A. K., Colley, A., Jamieson, R., Thompson, E. M., Rogers, J., Sillence, D., Tiller, G. E., Mulley, J. C. and Gecz, J., Identification of the gene (SEDL) causing X-linked spondyloepiphyseal dysplasia tarda, Nat. Genet. 22 (4), 400-404 (1999).

[0276] 16. Munakata, H., Yamagami, T., Nagai, T., Yamamoto, M. and Hayashi, N., Purification and structure of rat erythroid-specific delta-aminolevulinate synthase, J. Biochem. 114 (1), 103-111 (1993).

[0277] 17. Hagen, F. K., Gregoire, C. A. and Tabak, L. A., Cloning and sequence homology of a rat UDP-GalNAc:polypeptide N-acetylgalactosaminyltransferase, Glycoconj. J. 12 (6), 901-909 (1995).

[0278] 18. Ame, J. C., Rolli, V., Schreiber, V., Niedergang, C., Apiou, F., Decker, P., Muller, S., Hoger, T., Menissier-de Murcia, J. and de Murcia, G., PARP-2, A novel mammalian DNA damage-dependent poly(ADP-ribose) polymerase, J. Biol. Chem. 274 (25), 17860-17868 (1999).

[0279] 19. Kahn, S., Yamamoto, F., Almoguera, C., Winter, E., Forrester, K., Jordano, J. and Perucho, M., The c-K-ras gene and human cancer (review), Anticancer Res. 7 (4A), 639-652 (1987).

[0280] 20. Breiner, M., Schurmann, A., Becker, W. and Joost, H. G., Cloning of a novel member (ARL5) of the ARF-family of Ras-related GTPases, Biochim. Biophys. Acta 1308 (1), 1-6 (1996).

[0281] 21. Yogosawa, S., Makino, Y., Yoshida, T., Kishimoto, T., Muramatsu, M. and Tamura, T., Molecular cloning of a novel 120-kDa TBP-interacting protein, Biochem. Biophys. Res. Commun. 229 (2), 612-617 (1996).

[0282] 22. Mao, M., Fu, G., Wu, J. -S., Zhang, Q. -H., Zhou, J., Kan, L. -X., Huang, Q. -H., He, K. -L., Gu, B. -W., Han, Z.-G., Shen, Y., Gu, J., Yu, Y. -P., Xu, S. -H., Wang, Y., Chen, S. -J. and Chen, Z., Identification of genes expressed in human CD34(+) hematopoietic stem/progenitor cells by expressed sequence tags and efficient full-length cDNA cloning, Proc. Natl. Acad. Sci. U.S.A. 95 (14), 8175-8180 (1998); Zhang, Q. H., Ye, M., Wu, X. Y., Ren, S. X., Zhao, M., Zhao, C. J., Fu, G., Shen, Y., Fan, H. Y., Lu, G., Zhong, M., Xu, X. R., Han, Z. G., Zhang, J. W., Tao, J., Huang, Q. H., Zhou, J., Hu, G. X., Gu, J., Chen, S. J. and Chen, Z., Cloning and functional analysis of cDNAs with open reading frames for 300 previously undefined genes expressed in CD34+ hematopoietic stem/progenitor cells, Genome Res. 10 (10), 1546-1560 (2000).

[0283] 23. Springer, J., Kneissl, M., Putter, V. and Grummt, F., Identification and characterization of MmORC4 and MmORC5, two subunits of the mouse origin of replication recognition complex, Chromosoma 108 (4), 243-249 (1999).

[0284] 24. Xin, X., Varlamov, O., Day, R., Dong, W., Bridgett, M. M., Leiter, E. H. and Fricker, L D., Cloning and sequence analysis of cDNA encoding rat carboxypeptidase D, DNA Cell Biol. 16 (7), 897-909 (1997).

[0285] 25. Sato, N., Milligan, C. E., Uchiyama, Y. and Oppenheim, R. W., Cloning and expression of the cDNA encoding rat caspase-2, Gene 202 (1-2), 127-132 (1997).

[0286] 26. Guenette, R. S., Mooibroek, M., Wong, K., Wong, P. and Tenniswood, M., Cathepsin B, a cysteine protease implicated in metastatic progression, is also expressed during regression of the rat prostate and mammary glands, Eur. J. Biochem. 226 (2), 311-321 (1994).

[0287] 27. Ishidoh, K., Towatari, T., Imajoh, S., Kawasaki, H., Kominami, E., Katunuma, N. and Suzuki, K., Molecular cloning and sequencing of cDNA for rat cathepsin L, FEBS Lett. 223 (1), 69-73 (1987).

[0288] 28. Wada, K., Yokotani, N., Hunter, C., Doi, K., Wenthold, R. J. and Shimasaki, S., Differential expression of two distinct forms of mRNA encoding members of a dipeptidyl aminopeptidase family, Proc. Natl. Acad. Sci. U.S.A. 89 (1), 197-201 (1992).

[0289] 29. Tanaka, K., Kanayama, H., Tamura, T., Lee, D. H., Kumatori, A., Fujiwara, T., Ichihara, A., Tokunaga, F., Aruga, R. and Iwanaga, S., cDNA cloning and sequencing of component C8 of proteasomes from rat hepatoma cells, Biochem. Biophys. Res. Commun. 171, 676-683, (1990).

[0290] 30. Gnesutta, N., Ceriani, M., Innocenti, M., Mauri, I., Zippel, R., Sturani, E., Borgonovo, B., Berruti, G. and Martegani, E., Cloning and Characterization of Mouse UBPy, a Deubiquitinating Enzyme That Interacts with the Ras Guanine Nucleotide Exchange Factor CDC25Mm/Ras-GRFl, J. Biol. Chem. 276 (42), 39448-39454 (2001).

[0291] 31. Kato, M., Yamaguchi, T., Kin, N. and Sekine, S., HUMAN UBIQUITIN-BOUND ENZYME E2 AND cDNA CODING THE SAME, Patent: JP 1997000262-A 1, Jan. 7, 1997.

[0292] 32. Pajot, B., Sarger, C., Bonnet, J. and Garret, M., An alternative splicing modifies the C-terminal end of tryptophanyl-tRNA synthetase in murine embryonic stem cells, J. Mol. Biol. 242 (4), 599-603 (1994).

[0293] 33. Mukai, T., Joh, K., Arai, Y., Yatsuki, H. and Hori, K., Tissue-specific expression of rat aldolase A mRNAs: Three molecular species differing only in the 5′-terminal sequences, J. Biol. Chem. 261, 3347-3354 (1986).

[0294] 34 Hangjiong, C., Williams, D. and Shapiro, D., Cloning and sequencing of rat 3-hydroxy-3-methylglutaryl coenzyme a reductase, J. Lipid Res. (1989).

[0295] 35. Shinzawa, K., Inagaki, T., Ohishi, N., Ichihara, C., Tsukagoshi, N., Udaka, S. and Yagi, K., Molecular cloning of a cDNA for alpha-subunit of rat liver electron transfer flavoprotein, Biochem. Biophys. Res. Commun. 155, 300-304 (1988).

[0296] 36. Munakata, H., Yamagami, T., Nagai, T., Yamamoto, M. and Hayashi, N., Purification and structure of rat erythroid-specific delta-aminolevulinate synthase, J. Biochem. 114 (1), 103-111 (1993).

[0297] 37. Hagen, F. K., Gregoire, C. A. and Tabak, L. A., Cloning and sequence homology of a rat UDP-GalNAc:polypeptide N-acetylgalactosaminyltransferase, Glycoconj. J. 12 (6), 901-909 (1995).

[0298] 38. Iyer, R. K., Bando, J. M., Jenkinson, C. P., Vockley, J. G., Kim, P. S., Kern, R. M., Cederbaum, S. D. and Grody, W. W., Cloning and characterization of the mouse and rat type II arginase genes, Mol. Genet. Metab. 63 (3), 168-175 (1998).

[0299] 39. Jabs, E. W., Thomas, P. J., Bernstein, M., Coss, C., Ferreira, G. C. and Pedersen, P. L. Chromosomal localization of genes required for the terminal steps of oxidative metabolism: alpha and gamma subunits of ATP synthase and the phosphate carrier, Hum. Genet. 93 (5), 600-602 (1994).

[0300] 40. Kimoto, M., Sasakawa, T., Tsuji, H., Miyatake, S., Oka, T., Nio, N. and Ogawa, T., Cloning and sequencing of cDNA encoding NG,NG-dimethylarginine dimethylaminohydrolase from rat kidney, Biochim. Biophys. Acta 1337 (1), 6-10 (1997).

[0301] 41. O'Neill, R. R., Tokoru, T., Kozak, C. A. and Brady, R. O., Comparison of the chromosomal localization of murine and human glucocerebrosidase genes and of the deduced amino acid sequences, Proc. Natl. Acad. Sci. U.S.A. 86, 5049-5053 (1989).

[0302] 42. Robertson, D. A., Freeman, C., Morris, C. P. and Hopwood, J. J., A cDNA clone for human glucosamine-6-sulphatase reveals differences between arylsulphatases and non-arylsulphatases, Biochem. J. 288 (Pt 2), 539-544 (1992).

[0303] 43. Kobayashi M., Seki T., Yaginuma K., Koike K. “Nucleotide sequences of small ribosomal RNA and adjacent transfer RNA, genes in rat mitochondrial DNA”, Gene 16(1-3):297-307(1981); Saccone C., Cantatore P., Gadaleta G., Gallerani R., Lanave C., Pepe G., Kroon A. M., “The nucleotide sequence of the large ribosomal RNA gene and the adjacent tRNA genes from rat mitochondria”, Nucleic Acids Res. 9(16):4139-4148(1981).

[0304] 44. Yagita Y., Kitagawa K., Taguchi A., Ohtsuki T., Kuwabara K., Mabuchi T., R A Matsumoto M., Yanagihara T., Hori M., “Molecular cloning of a novel member of the HSPI 10 family of genes, ischemia-responsive protein 94 kDa (irp94), expressed in rat brain after transient forebrain ischemia”, J. Neurochem. 72(4): 1544-1551(1999).

[0305] 45 Wei N., Tsuge T., Serino G., Dohmae N., Takio K., Matsui M., Deng X. W., “The COP9 complex is conserved between plants and mammals and is related to the 26S proteasome regulatory complex”, Curr. Biol. 8(16):919-922(1998).

[0306] 46. Baka I. D., Ninkina N. N., Pinon L. G., Adu J., Davies A. M., Georgiev G. P., R A Buchman V. L., “Intracellular compartmentalization of two differentially spliced s-rex/NSP mRNAs in neurons”, Mol. Cell. Neurosci. 7(4):289-303(1996).

[0307] 47. Stevanovic M., Paunesku T., Radosavljevic D., Drmanac R., Crkvenjakov R., “variant chromosomal arrangement of adult beta-globin genes in rat”, Gene 79:139-150(1989).

[0308] 48. Yogosawa, S., Makino, Y., Yoshida, T., Kishimoto, T., Muramatsu, M. and Tamura, T., Molecular cloning of a novel 120-kDa TBP-interacting protein, Biochem. Biophys. Res. Commun. 229 (2), 612-617 (1996).

[0309] 49. Bodendorf, U., Cziepluch, C., Jauniaux, J. C., Rommelaere, J. and Salom, N., Nuclear export factor CRM1 interacts with nonstructural proteins NS2 from parvovirus minute virus of mice, J. Virol. 73 (9), 7769-7779 (1999).

[0310] 50 Okazaki, T., Yoshida, B. N., Avraham, K. B., Wang, H., Wuenschell, C. W., Jenkins, N. A., Copeland, N. G., Anderson, D. J. and Mori, N., Molecular diversity of the SCG10/stathmin gene family in the mouse, Genomics 18 (2), 360-373 (1993).

[0311] 51. Ogata, I., Saez, C. G., Greenwel, P., Ponce M de, L., Geerts, A., Leinwand, L. A. and Rojkind, M., Rat liver fat-storing cell lines express sarcomeric myosin heavy chain mRNA and protein, Cell Motil. Cytoskeleton 26 (2), 125-132 (1993).

[0312] 52. Hirosawa, M., Nagase, T., Ishikawa, K., Kikuno, R., Nomura, N. and Ohara, O., Characterization of cDNA clones selected by the GeneMark analysis from size-fractionated cDNA libraries from human brain, DNA Res. 6 (5), 329-336 (1999).

[0313] 53. Koster, F., Schinke, B., Niemann, S. and Hermans-Borgmeyer, I., Identification of shyc, a novel gene expressed in the murine developing and adult nervous system, Neurosci. Lett. 252 (1), 69-71 (1998).

[0314] 54. Kindler, S., Muller, R., Chung, W. J. and Garner, C. C., Molecular characterization of dendritically localized transcripts encoding MAP2, Brain Res. Mol. Brain Res. 36 (1), 63-69 (1996).

[0315] 55. Chiang, P. W., Wang, S., Smithivas, P., Song, W. J., Ramamoorthy, S., Hillman, J., Puett, S., Van Keuren, M. L., Crombez, E., Kumar, A., Glover, T. W., Miller, D. E., Tsai, C. H., Blackburn, C. C., Chen, X. N., Sun, Z., Cheng, J. F., Korenberg, J. R. and Kurnit, D. M., Identification and analysis of the human and murine putative chromatin structure regulator SUPT6H and Supt6 h, Genomics 34 (3), 328-333 (1996).

[0316] 56. Galcheva-Gargova, Z., Konstantinov, K. N., Wu, I. H., Klier, F. G., Barrett, T. and Davis, R. J., Binding of zinc finger protein ZPR1 to the epidermal growth factor receptor, Science 272 (5269), 1797-1802 (1996).

[0317] 57. Ishikawa, K., Nagase, T., Suyama, M., Miyajima N., Tanaka, A., Kotani, H., Nomura, N. and Ohara, O., Prediction of the coding sequences of unidentified human genes. X. The complete sequences of 100 new cDNA clones from brain which can code for large proteins in vitro, DNA Res. 5 (3), 169-176 (1998).

[0318] 58. Ann, D. K., Moutsatsos, I. K., Nakamura, T., Lin, H. H., Mao, P. -L., Lee, M. -J., Chin, S., Liem, R. K. H. and Wang, E., Isolation and characterization of the rat chromosomal gene for a polypeptide (pS1) antigenically related to statin, J. Biol. Chem. 266, 10429-10437 (1991).

[0319] 59. Eckley, D. M., Gill, S. R., Melkonian, K. A., Bingham, J. B., Goodson, H. V., Heuser, J. E. and Schroer, T. A., Analysis of Dynactin Subcomplexes Reveals a Novel Actin-related Protein Associated with the Arp1 Minifilament Pointed End, J. Cell Biol. 147 (2), 307-320 (1999).

[0320] 60. Maurel, P., Rauch, U., Flad, M., Margolis, R. K. and Margolis, R. U., Phosphacan, a chondroitin sulfate proteoglycan of brain that interacts with neurons and neural cell-adhesion molecules, is an extracellular variant of a receptor-type protein tyrosine phosphatase, Proc. Natl. Acad. Sci. U.S.A. 91 (7), 2512-2516 (1994).

[0321] 61. Elfring L. K., Deuring, R., McCallum, C. M., Peterson, C. L. and Tamkun, J. W., Identification and characterization of Drosophila relatives of the yeast transcriptional activator SNF2/SWI2, Mol. Cell. Biol. 14 (4), 2225-2234 (1994).

[0322] 62. Teasdale, R. D., Loci, D., Houghton, F., Karlsson, L. and Gleeson, P. A., A large family of endosome-localized proteins related to sorting nexin 1, Biochem. J. 358 (Pt 1), 7-16 (2001).

[0323] 63. Honore, B., Madsen, P. S., Andersen, A. H. and Leffers, H., Cloning and expression of a novel human profilin variant, profilin II, FEBS Lett. 330, 151-155 (1993).

[0324] 64. Bonnet, F., Perin, J. P., Charbonnier, F., Camuzat, A., Roussel, G., Nussbaum, J. L. and Alliel, P. M., Structure and cellular distribution of mouse brain testican. Association with the postsynaptic area of hippocampus pyramidal cells, J. Biol. Chem. 271 (8), 4373-4380 (1996).

[0325] 65. Lehar, S. M., Nacht, M., Jacks, T., Vater, C. A., Chittenden, T. and Guild, B. C., Identification and cloning of E124, a gene induced by p53 in etoposide-treated cells, Oncogene 12(6), 1181-1187(1996).

[0326] 66. Belgrader, P., Dey, R. and Berezney, R., Molecular cloning of matrin 3. A 125-kilodalton protein of the nuclear matrix contains an extensive acidic domain, J. Biol. Chem. 266, 9893-9899 (1991).

[0327] 67. Zalcman, G., Closson, V., Camonis, J., Honore, N., Rousseau-Merck, M. F., Tavitian, A. and Olofsson, B., RhoGDI-3 is a new GDP dissociation inhibitor (GDI). Identification of a non-cytosolic GDI protein interacting with the small GTP-binding proteins RhoB and RhoG, J. Biol. Chem. 271 (48), 30366-30374 (1996).

[0328] 68. Hamilton, B. A., Smith, D. J., Mueller, K. L., Kerrebrock, A. W., Bronson, R. T., van Berkel, V., Daly, M. J., Kruglyak, L., Reeve, M. P., Nemhauser, J. L., Hawkins, T. L., Rubin, E. M. and Lander, E. S., The vibrator mutation causes neurodegeneration via reduced expression of PITP alpha: positional complementation cloning and extragenic suppression, Neuron 18 (5), 711-722 (1997).

[0329] 69. Hart P. E., Poynter, G. M., Whitehead, C. M., Orth, J. D., Glantz, J. N., Busby, R. C., Barrett, S. L. and Salisbury, J. L., Characterization of the X-linked murine centrin Cetn2 gene, Gene 264 (2), 205-213 (2001).

[0330] 70. Ginzburg, I., Teichman, A., Dodemont, H. J., Behar, L. and Littauer, U. Z., Regulation of three beta-tubulin mRNAs during rat brain development, EMBO J. 4 (13B), 3667-3673 (1985).

[0331] 71. Chan, D. C., Bedford, M. T. and Leder, P., Formin binding proteins bear WWP/WW domains that bind proline-rich peptides and functionally resemble SH3 domains, EMBO J. 15 (5), 1045-1054 (1996).

[0332] 72. Scanlan, M. J., Gordan, J. D., Williamson, B., Stockert, E., Bander, N. H., Jongeneel, V., Gure, A. O., Jager, D., Jager, E., Knuth, A., Chen, Y. -T. and Old, L. J., Antigens recognized by autologous antibody in patients with renal-cell carcinoma, Int. J. Cancer 83 (4), 456-464 (1999).

[0333] 73. Kawabe, H., Hata, Y., Takeuchi, M., Ide, N., Mizoguchi, A. and Takai, Y., nArgBP2, a novel neural member of ponsin/ArgBP2/vinexin family that interacts with synapse-associated protein 90/postsynaptic density-95-associated protein (SAPAP), J. Biol. Chem. 274 (43), 30914-30918 (1999).

[0334] 74. Shankar, S., Mohapatra, B. and Suri, A., Cloning of a novel human testis mRNA specifically expressed in testicular haploid germ cells, having unique palindromic sequences and encoding a leucine zipper dimerization motif, Biochem. Biophys. Res. Commun. 243 (2), 561-565 (1998).

[0335] 75. Imamichi, T., Uchida, I., Wahl, S. M. and McCartney-Francis, N., Expression and cloning of migration inhibitory factor-related protein (MRP)₈ and MRP14 in arthritis-susceptible rats, Biochem. Biophys. Res. Commun. 194, 819-825 (1993).

[0336] 76. Bauer, V. W., Swaffield, J. C., Johnston, S. A. and Andrews, M. T., CADp44: a novel regulatory subunit of the 26S proteasome and the mammalian homolog of yeast Sug2p, Gene 181 (1-2), 63-69 (1996).

[0337] 77. Zhang, Q. H., Ye, M., Wu, X. Y., Ren, S. X., Zhao, M., Zhao, C. J., Fu, G., Shen, Y., Fan, H. Y., Lu, G., Zhong, M., Xu, X. R., Han, Z. G., Zhang, J. W., Tao, J., Huang, Q. H., Zhou, J., Hu, G. X., Gu, J., Chen, S. J. and Chen, Z., Cloning and functional analysis of cDNAs with open reading frames for 300 previously undefined genes expressed in CD34+ hematopoietic stem/progenitor cells, Genome Res. 10 (10), 1546-1560 (2000).

[0338] 78. Elgart, G. W. and Stanley, J. R., Cloning of the 5′ mRNA for the 230-kD bullous pemphigoid antigen by rapid amplification of cDNA ends, J. Invest. Dennatol. 101 (2), 244-246 (1993).

[0339] 79. Lee, Y. J., Park, C. W., Hahn, Y., Park, J., Lee, J., Yun, J. H., Hyun, B., and Chung, J. H., Mit1/Lb9 and Copg2, new members of mouse imprinted genes closely linked to Peg1/Mest(1), FEBS Lett. 472 (2-3), 230-234 (2000).

[0340] 80. Cenciarelli, C., Chiaur, D. S., Guardavaccaro, D., Parks, W., Vidal, M and Pagano, M., Identification of a family of human F-box proteins, Curr. Biol. 9 (20), 1177-1179 (1999).

[0341] 81. Nagase, T., Seki, N., Ishikawa, K., Ohira, M., Kawarabayasi, Y., Ohara, O., Tanaka, A., Kotani, H., Miyajima, N. and Nomura, N., Prediction of the coding sequences of unidentified human genes. VI. The coding sequences of 80 new genes (KIAA0201-KIAA0280) deduced by analysis of cDNA clones from cell line KG-1 and brain, DNA Res. 3 (5), 321-329 (1996).

[0342] 82. Nagase, T., Ishikawa, K., Kikuno, R., Hirosawa, M., Nomura, N. and Ohara, O., Prediction of the coding sequences of unidentified human genes. XV. The complete sequences of 100 new cDNA clones from brain which code for large proteins in vitro, DNA Res. 6 (5), 337-345 (1999).

[0343] 83. Ujita, M., Shinomura, T. and Kimata, K., Molecular cloning of the mouse osteoglycin-encoding gene, Gene 158 (2), 237-240 (1995).

[0344] 84. Chan, Y. L., Olvera, J., Paz, V. and Wool, I. G., The primary structure of rat ribosomal protein L11, Biochem. Biophys. Res. Commun. 185 (1), 356-362 (1992).

[0345] 85. Birling, M. C., Tait, S., Hardy, R. J. and Brophy, P. J., A novel rat tetraspan protein in cells of the oligodendrocyte lineage, J. Neurochem. 73 (6), 2600-2608 (1999).

[0346] 86. Mahnke-Zizelman, D. K., D'cunha, J., Wojnar, J. M., Brogley, M. A. and Sabina, R. L., Regulation of rat AMP deaminase 3 (isoform C) by development and skeletal muscle fibre type, Biochem. J. 326 (Pt 2), 521-529 (1997).

[0347] 87. Satoh, H., Fujii, H. and Okazaki, T., Molecular cloning and sequence analysis of two rat major globin cDNAs, Biochem. Biophys. Res. Commun. 146, 618-624 (1987).

[0348] 88. Gadaleta, G., Pepe, G., De Candia, G., Quagliariello, C., Sbisa, E. and Saccone, C. The complete nucleotide sequence of the Rattus norvegicus mitochondrial genome: cryptic signals revealed by comparative analysis between vertebrates, Journal of molecular evolution. 28 (6), 497-516 (1989).

[0349] 89. Fukunaga-Johnson, N., Lee, S. W., Liebert, M. and Grossman, H. B., Molecular analysis of a gene, BB1, overexpressed in bladder and breast carcinoma, Anticancer Res. 16 (3A), 1085-1090 (1996).

[0350] 90. Lai, C. H., Chou, C. Y., Ch'ang, L. Y., Liu, C. S. and Lin, Wc., Identification of novel human genes evolutionarily conserved in Caenorhabditis elegans by comparative proteomics, Genome Res. 10 (5), 703-713 (2000).

[0351] 91. Milner, R. J., Lai, C., Nave, K. -A., Lenoir, D., Ogata, J. and Sutcliffe, J. G., Nucleotide sequences of two mRNAs for rat brain myelin proteolipid protein, Cell 42, 931-939 (1985).

The application's sequence listing, which the Patent Office published only in electronic form, follows.

SEQUENCE LISTING (197 sequences)

SEQ ID NO: 1 - protein, 866 aa, Rattus norvegicus
  Janus protein tyrosine kinase 1
HSPKKQKNGYEKKRVPEATPLLDASSLEYLFAQGQYDLIKCLAPIRDPKTEQDGHDIENECLGMAVLAISHYAMMKKMQLPELPKDISYKRYIPETLNKSIRQRNLLTRMRINNVFKDFLKEFNNKTICDSSVSTHDLKVKYLATLETLTKHYGAEIFETSMLLISSENEPSRCHSNDSGNVLYEVMVTGNLGIQWRQKPNVLPVEKEKNKLKRKKLDYIKHKKEDARNKLREEWNSFSYFPEITHIVIKESVVSINKQDNKNMELKLSSHEGALSFVSLVDGYFRLTADAHHYLCTDVAPPLIVHNIQNGCHGPICTDIAFNKLRQEGSEEGMYVLRWSCTDFDNILIAVSCFEKSEVLGNQKQFKNFQIEVQKGRYSLHGSVDHFPSLRDLMNHLKKQILRTDNISFVLKRCCQSKPREISNLLVATKKAQEWQPVYSMSQLSFDRILKKDIIQGEHLGRGTRTHIYSGTLLDYKDDEGIAEEKKIKVILKVLDPSHRDISLAFFEAASMMRQVSHKHIVYLYGVCVRDVENIMVEEFVEGGPLDLFMHRKSDALTTPWKFKVAKQLASALSYLEDKDLVHGNVCTKNLLLAREGIDSDIGPFIKLSDLGIPVSVLTRQECIERNPWIAPECVEDSKNLSVAADKWSFGTTLWEIRYDGEIPLKDKTLIEKERFYESRCRPVTPSCKELADLMTRCMNYDPNQRPFFRAIMRDINKLEEQNPDIVSEKHPITEVDPTHFEKRFLKRIRDLGEGHFGKVELCRYDPEGDNTGEQVAVKSLKPESGGNHIADLKKEIEILRNLYHENIVKYKGICMEDGGNGIKLIMEFLPSGSLKEYLPKNKNKINLKQQLKYAIQICKGMDYLG

SEQ ID NO: 2 - DNA, 2597 bp, Rattus norvegicus
  Janus protein tyrosine kinase 1
cattctccaaagaagcagaaaaatggctatgagaagaaaagggttccagaagcaaccccactccttgatgccagttcactggagtatctgtttgcgcagggacagtatgatttgatcaaatgcctggctcccattcgggaccccaagacagagcaagatggacatgatattgagaatgagtgcctgggcatggctgtcctggccatctcacactatgccatgatgaagaagatgcagttgccagagcttcccaaagacatcagctacaagcgatatattccagaaacattgaataaatccatcagacagaggaatcttcttaccaggatgcgaataaataatgttttcaaggatttcttgaaggaatttaacaacaagaccatctgtgacagcagtgtgtctacacacgacctgaaggtgaagtacctggctaccttggaaaccttaaccaagcattatggagccgagatatttgagacttctatgctcctgatttcatcagaaaatgagccgagtcggtgccattccaacgacagtggcaatgttctctatgaagtcatggtaacaggaaatctcgggatccagtggcggcagaaaccaaatgttcttcctgttgaaaaggaaaaaaataaactgaagcggaaaaaactggactatattaaacacaagaaggaggatgccagaaacaaactccgggaagagtggaacagtttttcctatttccccgagattacccacattgttatcaaggagtctgtggtcagcattaacaaacaggacaacaagaacatggaactaaagctctcttctcatgagggagccttgtccttcgtgtccctggtagatggctacttccggctcactgcagatgctcaccattacctctgtactgatgtggctcccccgctgattgtccacaacatacagaatggctgtcacggtccaatctgcacagatattgcattcaataagctgcggcaggaggggagtgaggaggggatgtacgtgctgaggtggagctgcaccgactttgacaacattcttattgctgtcagctgcttcgaaaagtccgaggtattgggtaatcagaagcagttcaagaactttcagattgaggtgcagaagggccgctacagcctgcatggctctgttgaccactttcccagcctgagagacctcatgaaccacctcaagaagcagatcctgcgcacggacaatataagctttgtgctgaaacgctgctgtcagtctaagcctcgagaaatctccaacctactagtagccactaagaaagcccaggagtggcagcctgtctactctatgagccagctgagtttcgatcggatccttaagaaagatattatccaaggtgagcaccttggcagaggcacaagaacacatatctattctgggaccctgctggattacaaggacgatgaaggaattgctgaagaaaagaagataaaagtgattctcaaagtcctagaccctagccaccgggacatttcactggccttctttgaggcagccagcatgatgagacaggtttcccacaaacacatcgtgtacctctacggcgtctgtgtccgagatgtagaaaatatcatggtggaagagtttgtggagggggggccattggatctcttcatgcaccggaaaagtgatgcacttactaccccttggaagtttaaagttgccaaacagctggccagcgccctgagttacttggaagataaagacctcgttcatggaaatgtgtgcactaaaaacctcctcctggcccgtgagggcattgacagtgacattggcccgttcatcaagcttagtgaccttggcatcccagtctctgtgctgaccaggcaagagtgcatagagcgaaatccctggatcgctcctgagtgtgttgaagactccaagaacctgagtgtggctgctgacaagtggagctttggaaccacactctgggaaatccgctacgatggcgagatcccactcaaggacaagaccctcattgagaaagagaggttttatgaaagccgctgcaggccagtgacaccatcttgcaaggagctagctgacctcatgactcgctgcatgaactatgatcccaaccagagacctttcttccgagccatcatgagggacattaacaagctggaggagcagaatccagacattgtttcagaaaagcacccaataacagaggtggatcccactcattttgaaaagcgtttcctaaagaggattcgtgacttgggagagggtcactttgggaaggttgagctctgcagatatgatcctgagggagacaacacaggggaacaggtagctgtcaagtccctgaagcctgagagtggaggtaaccacatagctgatctgaagaaggagatagagatcttacggaacctctaccacgagaacattgtgaagtataaaggaatctgcatggaagacggggggaatggtatcaagctcatcatggagtttctgccttcgggaagcctaaaggaatatctgccaaagaataagaacaaaatcaacctcaaacagcagctaaaatatgccatccagatttgtaaggggatggactatctggg

SEQ ID NO: 3 - protein, 816 aa, Rattus norvegicus
  Phosphatidylinisitol 4-kinase
MGDMVVEPATLKPTSEPTPSPSGNNGGSLLSVITEGVGELSVIDPEVAQKACQEVLEKVKLLHGGVAISSKGSPLELVNGDGVDNEIRCLDDPPTEIREEEDEMEPGVVSGTAKGTRRRRQNNSAKQSWLLRLFESKLFDISMAISYLYNSKEPGVQAYIGNRLFCFRNEDVDFYLPQLLNMYIHMDEDVGDAIKPYIVHRCRQSINFSLQCALLLGAYSSDMHISTQRHSRGTKLRKLILSDELKPAHRKRELPTLSPAPDTGLSPSKRTHQRSKSDATASISLSSNLKRTASNPKVENEDEELSSSTESIDNSFSSPVRLAPEREFIKSLMAIGKRLATLPTKEQKTQRLISELSLLNHKLPARVWLPTAGFDHHVVRVPHTQAVVLNSKDKAPYLIYVEVLECENFDTTNVPARIPENRIRSTRSVENLPECGITHEQRAGSFSTVPNYDNDDEAWSVDDIGELQVELPEVHTNSCDNISQFSVDSITSQESKEPVFIAAGDIRRRLSEQLAHTPTAFKRDPEDPSAVALKEPWQEKVRRIREGSPYGHLPNWRLLSVIVKCGDDLRQELLAFQVLKQLQSIWEQERVPLWIKPYKILVISADSGMIEPVVNAVSIHQVKKQSQLSLLDYFLQEHGSYTTEAFLSAQRNFVQSCAGYCLVCYLLQVKDRHNGNILLDAEGHIIHIDFGFILSSSPRNLGFETSAFKLTTEFVDVMGGLNGDMFNYYKMLMLQGLIAARKHMDKVVQIVEIMQQGSQLPCFHGSSTIRNLKERFHMSMTEEQLQLLVEQMVDGSMRSITTKLYDGFQYLTNGIM

SEQ ID NO: 4 - DNA, 3205 bp, Rattus norvegicus
  Phosphatidylinisitol 4-kinase
ttactatggcatcggtagtgtcctgacagttcggaaagcaggaaagcaagcgccgagaagaaaggctcgggcccagcggactcttacatcgcaacccatcaaggaattgttattttgggtcctgcaagtggggtccggtccaacttgaggtagcgtgaaggccccttcaggcggcgccgcgggcagccccgcagccggggcctggtgcagccgccgcggccgctgtcagggaagcgcaggcggccaatggaacccgggagcggccgctgctgctgaggcggcggtgtcggcagtccgaccccgaccgcctgcaccccctccgcgagggtcccccggagcttggaagctcgaagtctggctgtagccatgggagacatggtagtggagcctgccaccctgaagccaacttctgagcctactcctagcccatcagggaataacgggggctccctactaagcgtcatcacggagggggtcggggaactgtcagtgattgaccctgaggtggcccagaaggcctgccaggaggtactggagaaagtcaagcttttgcatggaggtgtagccatctctagcaaaggcagcccactggagttggttaatggggatggtgtggacaatgagatccgttgcctagatgatccacctaccgagatcagggaggaagaagatgagatggagcctggtgtggtctctggcacagccaaaggaacaagaagaagacgacagaacaactcagccaaacagtcttggctcctgaggctgtttgaatcaaaactatttgacatctctatggccatttcatacttgtataactccaaggagccgggagtgcaagcctacattggcaaccggctcttctgctttcgcaatgaggatgtggacttctatttgccccagttgcttaacatgtatatccatatggatgaggatgtgggtgatgccattaaaccctacatagtccaccgttgtcgccagagcatcaacttttccctccagtgtgccctgttgcttggggcctactcttcagacatgcacatttccactcaacgacactcccgagggaccaagttacggaagctaatcctctcagatgagctgaagccagctcaccgaaagagggagctgccaactttaagcccagcccctgacacaggactgtctccctctaaaaggactcaccagcgctctaagtcagatgccacggccagcataagtctcagcagcaacctgaaacgaacagccagcaaccctaaagtggagaatgaggatgaggagctctcctccagcaccgagagtattgataattcattcagttcccctgtccggctggcccctgagcgagaattcatcaagtccttgatggcaatcggcaaacggctggccacgctccccactaaagagcaaaaaacacaaaggctgatctcagaactttccctgctcaaccataagctccctgcccgagtctggctgcccacagctggctttgaccaccacgtggtccgtgtgccccacacacaagctgttgtcctcaattccaaggataaggctccctacctgatctatgtggaagttcttgaatgtgaaaacttcgacacaactaatgttcctgcccggattcctgaaaaccgaattcggagtacgaggtctgtggagaacctgccggaatgtggtatcactcacgagcagcgggctggcagcttcagcactgtgcccaattatgacaatgacgatgaagcctggtcggtggatgacataggcgagctgcaggtggagctcccagaagtgcacaccaacagctgtgacaacatctctcagttctcggtggacagcatcaccagccaggagagcaaggagcctgtgttcattgcggcaggggacatcagacggcgcctttcagaacagctggctcacactcccacagccttcaaacgagaccctgaagacccttctgcagtcgccctcaaagagccctggcaggagaaagtgcggaggatcagagaaggttccccgtatggccatcttcccaattggcgactcctttcagtcattgtcaagtgtggagatgaccttcgccaggagctgctggctttccaggtgttgaaacaactgcagtccatttgggaacaggagcgagtgcctctttggatcaagccatataagattcttgtgatttcagctgacagtggcatgattgaaccagtagtcaacgctgtgtccatccaccaggtgaagaaacagtcacagctctccttgctcgattacttcctgcaggagcatggcagttacaccactgaggcattcctcagtgcccagcgcaattttgtgcaaagttgtgctggctactgcttggtctgctacctattacaagtcaaggacaggcacaatgggaacatccttctggacgcagaaggtcacatcatccacatcgactttggcttcatcctttccagctcaccccgaaacctgggcttcgagacgtcagcctttaagctgaccacagaatttgtggatgtaatgggcggcctgaacggtgatatgttcaactactataagatgctcatgctgcaagggctgatcgctgctcgcaaacacatggacaaggtggtacagattgtggagatcatgcagcaaggttctcagcttccttgcttccatggctccagcaccattcgcaacctcaaagagaggttccacatgagcatgactgaggagcagctgcagctgctggtggagcagatggtggacggcagcatgaggtccatcaccaccaaactctacgatggcttccagtacctcaccaatggcatcatgtgacaccactttcaggcccagaagtggtgggattgaaggcaccctccttaggaggacccttgcctaagaaaacctaaatcacaaaatcccacctacctaaccacctacccaagggaaatggaaggcaaaaaacacaaaggatcatgtggtaaccatgagagctggccaaagggtaggagagccaaccatggggtccagacttgctggggcttccccacctcttgctgtgtcagtattgccacctgacagatcccaggactcactgccctccagagaacagagatgatgaacatgaggaggactggaaccttcttcccctcggggatctcatcttttactatccctgggtcccagcaagatgggaggagtgggttcttggtacttaggactt

SEQ ID NO: 5 - protein, 1379 aa, Rattus norvegicus
  ROK-alpha
MPGAPEAAAGDGAGAGRQRKLEALIRDPRSPINVESLLDGLNSLVLDLDFPALRKNKNIDNFLNRYEKIVKKIRGLQMKAEDYDVVKVIGRGAFGEVQLVRHKASQKVYAMKLLSKFEMIKRSDSAFFWEERDIMAFANSPWVVQLFCAFQDDRYLYMVMEYMPGGDLVNLMSNYDVPEKWAKFYTAEVVLALDAIHSMGLIHRDVKPDNMLLDKHGHLKLADFGTCMKMDETGMVHCDTAVGTPDYISPEVLKSQGGDGYYGRECDWWSVGVFLFEMLVGDTPFYADSLVGTYSKIMDHKNSLCFPEDTEISKHAKNLICAFLTDREVRLGRNGVEEIKSASFFKNDQWNWDNIRETAAPVVPELSSDIDSSNFDDIEDDKGDVETFPIPKAFVGNQLPFIGFTYFRENLLLSDSPPCRENDAIQTRKSEESQEIQKKLYALEEHLSSEVQAKEELEQKCKSINTRLEKTAKELEEEITFRKNVESTLRQLEREKALLQHKNAEYQRKADHEADKKRNLENDVNSLKDQLEDLKKRNQSSQISTEKVNQLQKQLDEANALLRTESDTAARLRKTQAESSKQIQQLESNNRDLQDKNCLLETAKLKLEKEFINLQSALESERRDRTHGSEIINDLQGRISGLEEDLKTGKTLLAKVELEKRQLQEKLTDLEKEKSNMEIDMTYQLKVIQQSLEQEEAEHKTTKARLADKNKIYESIEEAKSEAMKEMEKKLLEERSLKQKVENLLLEAEKRCSILDCDLKQSQQKLNELLKQKDVLNEDVRNLTLKIEQETQKRCLMQNDLKMQTQQVNTLKMSEKQIKQENNHLMEMKMNLEKQNAELRKERQDADGQMKELQDQLEAEQYFSTLYKTQVRELKEENEEKTKLCKELQQKKQDLQDERDSLAAQLEITLTKADSEQLARSIAEEQYSDLEKEKIMKELEIKEMMARHKQELTEKDATIASLEETNRTLTSDVANLANEKEELNNKLKDTQEQLSKLKDEEISAAAIKAQFEKQLLTERTLKTQAVNKLAEIMNRKEPVKRGSDTDVRRKEKENRKLHMELKSEREKLTQQMIKYQKELNEMQAQIAEESQIRIELQMTLDSKDSDIEQLRSQLQALHIGMDSSSIGSGPGDAEPDDGFPESRLEGWLSLPVRNNTKKFGWVKKYVIVSSKKILFYDSEQDKEQSNPYMVLDIDKLFHVRPVTQTDVYRADAKEIPRIFQILYANEGESKKEPEFPVEPVGEKSNYICHKGHEFIPTLYHFPTNCEACMKPLWHMFKPPPALECSRCHIKCHKDHMDKKEEIIAPCKVYYDISSAKNLLLLANSTEEQQKWVSRLVKKIPKKPPAPDPFARSSPRTSMKIQQNQSIRRPSRQLAPNKPS

SEQ ID NO: 6 - DNA, 4470 bp, Rattus norvegicus
  ROK-alpha
gggccgggcggaggttcgcgggcggcgctaggccgggcgaagcggcatgagccggcccccgccgacggggaaaatgcccggcgcccccgaggccgcggccggggacggggcgggcgcgggtcgtcagaggaagctggaggcgctcatccgagaccctcgctcgcccatcaacgtggaaagcctgctggatggcttaaattccttggtccttgatttggattttcctgctttgaggaaaaataaaaatatagataatttcctaaatagatatgagaaaattgtgaaaaaaatcagaggtttacagatgaaagcagaagactatgatgttgtaaaagttattggaagaggtgcttttggtgaagttcagttggttcgtcataaggcatcacagaaggtttatgcaatgaagcttcttagtaaatttgaaatgataaaaagatcagattctgcttttttctgggaagaaagagatattatggcttttgctaacagtccgtgggtggttcagctcttttgtgcctttcaagatgacaggtatctgtacatggtgatggagtacatgccaggtggagaccttgttaacctgatgagcaattatgatgtgcctgagaagtgggccaagttttatactgctgaagtcgtgcttgcactggatgcaatacactccatgggcttaatacacagagatgtgaagcccgataacatgctattggataaacacggacatctaaaattagcagattttggcacatgtatgaaaatggatgaaacaggcatggtgcattgtgatacagcagttggaactccagactacatatcacctgaggttctgaaatcacaaggaggtgatggttactatggacgagaatgtgattggtggtctgtaggtgttttcctttttgagatgttagtaggggacactccattttatgcagattcacttgtaggaacctacagcaaaattatggatcataaaaattcactgtgttttcctgaagatacagaaatttctaaacatgcgaagaatctcatatgtgccttcttaacagacagggaggtacgacttggaagaaatggggtagaagaaatcaaatcagcatccttctttaagaatgatcagtggaattgggataacataagagagacggcagctccagtggtgcctgagctcagcagtgacatagacagcagcaactttgatgacattgaggatgacaaaggcgatgtagagaccttcccgattcctaaagcttttgtgggaaatcagctgccttttataggatttacctactttagagaaaatttgttactaagtgattctccaccttgtagagaaaatgatgcaatacaaacaaggaaaagtgaagaaagtcaggagattcagaaaaaattatatgcactagaagaacaccttagcagtgaggtacaagccaaggaggaactggaacagaagtgcaagtctattaatactcgtctagagaaaacagcaaaggaactagaagaagagattacctttaggaaaaatgtggaatcaacattaagacagctagaaagagaaaaggcccttcttcagcacaaaaatgcagaatatcaacggaaagctgatcatgaagctgacaagaaacggaatttggaaaatgatgttaacagcttaaaagatcaacttgaagatttgaagaaaagaaaccagagctctcagatatccactgagaaggtcaatcagctccagaaacaactggatgaagctaatgctttgctaagaacagagtctgatactgcagcacggttaagaaaaacccaggcagaaagttccaaacagattcagcagctggaatctaacaatagagatctacaagataaaaactgcctgcttgaaactgccaagttaaaacttgagaaggaatttatcaatcttcagtcagctctagaatctgaaagaagggaccggacccatggatcagagataattaatgatttacaaggtagaatatctgggttggaagaagatttgaagactggcaaaaccttactagcaaaagtagagctggagaagagacagctgcaggagaagctcactgacttagagaaggaaaagagcaacatggaaatagatatgacatatcaactgaaagttatacagcagagtttagaacaagaagaagctgaacacaagaccacaaaagcacgactagcggataaaaataagatctatgaatccattgaagaagctaaatcagaagccatgaaagaaatggagaagaagctgttggaagagaggtctttaaagcagaaagtggagaacctactcctggaagccgagaagagatgttctatattggattgtgacctcaaacagtctcagcagaaactgaatgagctgctgaagcagaaagatgtgctgaatgaggatgttagaaatttgacattaaaaatagagcaggaaactcagaagcgttgtcttatgcaaaatgacctgaagatgcagacccagcaagttaacaccctaaaaatgtcagaaaagcaaataaaacaagaaaataatcatcttatggaaatgaaaatgaacttggaaaagcaaaatgctgaacttcgaaaagagcggcaggatgcagatgggcagatgaaggaactgcaagaccaacttgaagcagagcagtatttctcaaccctctataaaacacaagttagagaacttaaagaagaaaatgaagagaaaactaaactttgtaaagagttgcagcagaaaaagcaggatttacaggatgaaagagactccttggctgcccagctggagatcaccctcaccaaagcagactctgagcagctggctcgctccattgctgaggagcaatactctgacttggaaaaagagaagatcatgaaagagctggaaatcaaagagatgatggctagacacaaacaagagcttactgaaaaggacgctacaattgcatcccttgaagaaacaaatagaacactaactagtgatgttgcaaatcttgcaaacgagaaagaagaactaaacaacaagttgaaagatacccaagaacaactgtcaaagttgaaagatgaagagatcagtgcagcggctattaaagcacagtttgagaagcagctgctgactgagcgaacactcaagactcaagctgtgaataagttggcagagatcatgaatcgaaaagaacctgtcaagcgtggtagtgacacagatgtgcgaagaaaagaaaaggaaaacagaaaattacatatggagcttaagtctgaacgtgaaaaattgacacaacagatgatcaaatatcagaaagaactgaatgaaatgcaggctcaaatagctgaagagagccaaattcgaatagaactgcagatgaccctggacagtaaagacagtgacattgaacagcttcggtcgcagctccaggccttgcatattggtatggacagttccagtataggcagtggaccaggggatgctgagcctgatgacggatttccagaatcacgattagaaggatggctgtcgttgcctgtgcggaacaacactaaaaagtttggatgggttaagaagtatgtgattgtaagcagcaagaagattcttttctatgatagtgaacaagataaagagcagtctaacccttacatggtgttagacatagacaagctatttcatgtccgacctgttactcagacagatgtatacagagcagatgctaaagaaattccaaggatatttcagatcctgtatgccaatgaaggagaaagtaaaaaggaaccagaatttccagtggaaccagtgggagaaaaatctaattatatttgccacaaaggacatgagtttattcctactctttatcacttcccaaccaactgtgaggcctgtatgaagccactgtggcacatgtttaaacctcctcctgctctagagtgcagtagatgccacattaaatgtcataaagatcacatggacaaaaaggaagagatcatagccccctgcaaagtttattatgatatatcatcggcaaagaatctgttgttattagcaaattcaacggaagaacagcagaaatgggttagtcggttggtgaaaaagatacctaaaaagcctccagctccagacccttttgcccgatcatcccctagaacctcaatgaaaatacaacaaaaccagtccattcggcggcccagtcgacagcttgctccaaacaaaccaagctaacttgccttctatgaaagcagttattgaaggtgatcatattcttccatccacaagactgaaatatggtttctcaaaacttaactaaaaagctatatttttactgagacacatacatacaccacatgtcgctcgttgcgtgcatgcttgcagtcccttcccccctgaaataattacaaatcatggagaggtttgtctgggctactttgaacagttgaacaaacaatggttggtgaggtaaaaaaagtgtcctacaattc

SEQ ID NO: 7 - protein, 215 aa, Rattus norvegicus
  Casein kinase II beta subunit
MSSSEEVSWISWFCGLRGNEFFCEVDEDYIQDKFNLTGLNEQVPHYRQALDMILDLEPDEELEDNPNQSDLIEQAAEMLYGLIHARYILTNRGIAQMLEKYQQGDFGYCPRVYCENQPMLPIGLSDIPGEAMVKLYCPKCMDVYTPKSSRHHHTDGAYFGTGFPHMLFMVHPEYRPKRPANQFVPRLYGFKIHPMAYQLQLQAASNFKSPVKTIR

SEQ ID NO: 8 - DNA, 1964 bp, Rattus norvegicus
  Casein kinase II beta subunit
ggctgccgcggcccggtcggctttctgcgctgtagcggtctctgccgttccttggaagcacagctccccttccccgccccagtcccagtccccgtccggccgcggacataaagatgagtagctctgaggaggtgtcctggatttcctggttctgtgggctccgtggtaatgaattcttctgtgaggtggatgaagactacatccaggacaaatttaatcttactggactcaatgagcaggtgcctcactatcgacaagccctagacatgatcttggacctggaacctgatgaagagctggaagacaaccccaaccagagtgacttgattgagcaggcggccgagatgctctatgggttgatccacgcccgctacatcctcaccaaccggggcattgcacaaatgttggaaaagtaccagcaaggagactttggctactgtcctcgagtatactgtgagaaccagccgatgcttcccatcggcctttcggacatcccaggagaggccatggtgaagctctactgccccaagtgcatggacgtgtacacacccaagtcctctaggcaccaccacacggatggcgcatacttcggcactggtttccctcacatgctcttcatggtgcatcccgagtaccggcccaagcggccggccaaccagtttgtgcccaggctctacggtttcaagatccatccaatggcctaccagctgcagctccaagccgccagcaacttcaagagcccagtcaagacgattcgctgagtgccctcccacctcctctgcctgtgacaccaccgtccctccgctgccaccctttcaggaagtctatggtttttagtttaaattaaaggaattgttactgtggtggggatatgaaataaaggaagagaaggctaaaaaaaaaaaaaaaaaccgaattcggcatctcacctaggtgtatacagctgcacattaccaatggctgcagaacacccaatcatgacctctagtgctttatagcaaaagtgtaaagtggtacctgggtgaccagcattgccatggttacatccatttgcgtaatcaagcagctgtgcaactgctcttctaacagatgaacagctgcatgcatctccagcaggcatggattgtctcttgtctatgatcctcagtgcgttcacttagagtatttctagagtttgagtccttgccgtgatagagccatgtagggaatgcactgattgcatgttaccccaagcgtcatgaaaccttccgacacggtgacctatttaatggtcttgtttgttgacatgacaaattaacattcttagagttacatctcgaaaaaagcatttgtgatagataagccctttgagccttgtggctaaatttttgtggctttgtttaactttcaaaggttatatatgcactaaccttttttgatggctaagtaggctttaaattacagtaaattttttcaaataaaactggctgtaaaatatattttgaattagagttgttcactttttcatagctacttatgtttttttcccaataatttatttcacatctctaccagtgaacgcagcccatcactagaaaatgaccttgtcctgatttcagtttcaactattagttttaaagctcactgttgaataagaggaagtggtggtgcattttaaattgactttcatgtgcttttaaaatatgacagatctccttgataatgtacttttatttgatctcaagttgtataaaaccaataaatttgtgttactttgattgcagtagtatcttatgcatagtgattccatgttatatgcagactagttaggcaactgttttcttagttacaagcttcacttttgtgcagttaaaaaaacaaaagtaggctacagtctgtgccatgttgatgtacagtttctgaaattgttttacaagactttgataataaaacccttaaactcacaaaaaaaaaaaaaaaaaacc

SEQ ID NO: 9 - protein, 543 aa, Rattus norvegicus
  ERK3
MAEKFESLMNIHGFDLGSRYMDLKPLGCGGNGLVFSAVDNDCDKRVAIKKIVLTDPQSVKHALREIKIIRRLDHDNIVKVFEILGPSGSQLTDDVGSLTELNSVYIVQEYMETDLANVLEQGPLLEEHARLFMYQLLRGLKYIHSANVLHRDLKPANLFINTEDLVLKIGDFGLARIMDPHYSHKGHLSEGLVTKWYRSPRLLLSPNNYTKAIDMWAAGCIFAEMLTGKTLFAGAHELEQMQLILESIPVVHEEDRQELLSVIPVYIRNDMTEPHKPLTQLLPGISREALDFLEQILTFSPMDRLTAEEALSHPYMSIYSFPTDEPISSHPFHIEDEVDDILLMDETHSHIYNWERYHDCQFSEHDWPIHNNFDIDEVQLDPRALSDVTDEEEVQVDPRKYLDGDREKYLEDPAFDTSYSAEPCWQYPDHHENKYCDLECSHTCNYKTRSPSYLDNLVWRESEVNHYYEPKLIIDLSNWKEQSKDKSDKRGKSKCERNGLVKRRLRLRKRPSSWLRGRGAKALTLMPSSQAPFSSVPSVSLLT

SEQ ID NO: 10 - DNA, 3662 bp, Rattus norvegicus
  ERK3
agacctgccgggcgcatatttattcacagttttgtcccatgttaagtcggttagcatagtgaatctgagtgcatagtatgtcatttcattccgttgagtttctcgagtgttttctttaaatgtctgcagagtcgctacccttccttgaactatgaagcactgcaatcttcttaattctcagtatgaagagagatttttgagctttaagtctgaggggaactcagcaggcctggttggcgtctgcaatgaacatcaagaaaccatcgtgctgtgggaatgtgatcgtttttctccctttttgagagatctttccttttgatgccagttttcttccttgtttacacaagttcaacaatttgaaaggaaaaggcaattgtaagggttttaaaatggcagagaaatttgaaagtctcatgaacattcatggctttgatctgggttccaggtacatggacttaaaaccattgggctgtggaggcaatggcttggttttttctgctgtagacaatgactgtgacaaaagagtagccatcaagaaaattgtcctcaccgatccccagagtgtcaaacatgccctccgtgaaatcaaaattattagaagacttgaccacgataacattgtgaaagtgtttgaaattcttggtcccagtggaagccagctgacagacgatgtgggctctctaacagagctgaatagcgtctacattgttcaggagtacatggagacagacttggcgaacgtgctggagcagggccctttactggaggagcatgccaggctcttcatgtaccagctgctgcgtgggctcaagtacatccactctgcaaacgtgctgcacagggatctcaagccggccaaccttttcattaacactgaagacttggtgctgaagattggtgactttggcctggcccggatcatggatcctcattattcccataagggtcatctttctgaaggattggttaccaaatggtacagatctccacggcttttactttctcctaataactatactaaagccattgacatgtgggctgcaggctgcatctttgctgaaatgctgactggtaaaaccctctttgcaggtgcacatgaacttgaacagatgcagctgatcttggagtctatccctgttgtgcacgaggaagatcggcaggagcttctcagcgtgattccagtttacattagaaacgacatgactgagccacacaaaccgctgactcagctgcttccggggattagtcgggaagcactggatttcctggaacagattctgacgttcagtcccatggaccggctgacagccgaggaagcactttcccatccttacatgagcatctactctttcccaacggacgagcctatttccagccatcctttccacatagaagacgaagtggacgacattttgctaatggatgaaacacacagtcacatttataactgggaaaggtaccacgattgtcagttctcggagcatgactggcctattcataacaactttgatatcgatgaggttcagcttgacccgagagctctgtctgatgtcaccgatgaagaagaagttcaagttgatcctcgaaagtacttggatggagaccgagagaagtatctggaggatcccgccttcgacaccagctactctgctgagccttgctggcagtacccagatcaccacgagaacaagtactgtgatctggagtgtagccacacctgtaactacaaaacaaggtcgccatcatacttagataacctggtgtggagggagagcgaggttaaccattactatgagcccaagcttattatagatctttccaactggaaagagcaaagtaaggacaaatccgacaagagaggcaagtccaagtgtgagaggaacgggttggtcaagcgcagattgcgcttgaggaagcgtcccagcagctggctgagagggagaggggccaaggctttgactttgatgccttcatcgcaggcaccgttcagctcagtgcccagcgtgagtctgctgacgtagttgacaagttaaacgacttgaatagctcagtgtcccagctagaaatgaaaagcctgatatccaagtcagtcagccgagaaaagcaagaaaagggaagggctaacctggcccagctgggagccttgtaccagccctcctgggagagccagtttgtgagtggcggggaggagtgcttccttatcagtcagttttgttgtgaggtcaggaaggacgaacacgtggagaaggagaacacttacaccagctatttggacaagttttttagcaggaaggaggattctgaaatgctagaaactgagccagtggaagaagggaagcgtggggagagaggccgtgaggcagggcttctgagcagcggtggggagtttctcctgagcaggcagctagagtccataggcaccccgcagttccacagtccagggggatccccactcaagtccatccaggccacgttaacaccttccgctatgaaatcttcccctcaaatccctcacaagacatacagcaacattctgaaacatctgaactaaacactcagcagacacttcttttgttcttcatgaaatgtgttgtgtcttttttatcactaatgttttaagtcattttttttttacttgaatcagaaggtgtcattaatttgcaaggatttttcttggttctcagtttgtaaaacacagagttttttctacatgtgagttagttttcatttgaactggcatgtcgtttgcacacacacaaagaatagagcaaaacaatgcagtgcaggaggagacaagatgcgctaggatggacagacattctcacagaccagtgacctgcttacaggaaacaaaaccttgccttgaaacttacacagtgagactgtacataattgcatgaaaagatctatttttttcctgaaacatttttcattcattagtattttcaagtttttcatactgtacacatttcttaagacacatgataccagcagcaactgaaaacgaatgccgaatttggtacacatgtgttatctacctcaaggtaacaaaagtatgcgggcgaaacctaacccacccatagtcgtccgcggcatatgcacttgtatctagccagcgttggccgcagtaaccaatgagactcgtccgccatttatcaatgtcctggtgttcatcctttacagtgaagtgttagatacatcacatcttatttatttttagcaaatcagtatattttctgtatttaattataaaaggtaacttagtttaagtttatttgcaactgcccttcttcccgtttggcactatggtttgttgcctgccgagctgatctgagaagtcagcttgtcccgaggctgtccatgtacgttaagtaaagtgctcactgtgtataggaatctgtattttggaggtgcttgatctatctacaaagaaaaaaattaggaatttattataaaatgctcctagaagtcttaatggtgtttattttttaaaaccttgtaatgttagacttgtgtgcatggaagtgattaaggtacatcattattgtagtttgaacattgtacatgataagccttcccccacccccgtttttactgtatgtttttattgaatgatctattccccatccctaggcaagcatgaataaaattaggttaaatgt

SEQ ID NO: 11 - protein, 821 aa, Rattus norvegicus
  Neural receptor protein-tyrosine kinase
MSPWPRWHGPAMARLWGLCLLVLGFWRASLACPMSCKCSTTRIWCTEPSPGIVAFPRLEPNSIDPENITEILIANQKRLEIINEDDVEAYVGLKNLTIVDSGLKFVAYKAFLKNGNLRHINFTRNKLTSLSRRHFRHLDLSDLILTGNPFTCSCDIMWLKTLQETKSSPDTQDLYCLNESSKNTPLANLQIPNCGLPSARLAAPNLTVEEGKSVTISCSVGGDPLPTLYWDVGNLVSKHMNETSHTQGSLRITNISSDDSGKQISCVAENLVGEDQDSVNLTVHFAPTITFLESPTSDHHWCIPFTVRGNPKPALQWFYNGAILNESKYICTKIHVTNHTEYHGCLQLDNPTHMNNGDYTLMAKNEYGKDERQISAHFMGRPGVDYETNPNYPEVLYEDWTTPTDIGDTTNKSNEIPSTDVADQTNREHLSVYAVVVIASVVGFCLLVMLLLLKLARHSKFGMKGPASVISNDDDSASPLHHISNGSNTPSSSEGGPDAVIIGMTKIPVIENPQYFGITNSQLKPDTFVQHIKRHNIVLKRELGEGAFGKVFLAECYNLCPEQDKILVAVKTLKDASDNARKDFHREAELLTNLQHEHIVKFYGVCVEGDPLIMVFEYMKHGDLNKFLRAHGPDAVLMAEGNPPTELTQSQMLHIAQQIAAGMVYLASQHFVHRDLATRNCLVGENLLVKIGDFGMSRDVYSTDYYRVGGHTMLPIRWMPPESIMYRKFTTESDVWSLGVVLWEIFTYGKQPWYQLSNNEVIECITQGRVLQRPRTCPQEVYELMLGCWQREPHTRKNIKNIHTLLQNLAKASPVYLDILG

SEQ ID NO: 12 - DNA, 4757 bp, Rattus norvegicus
  Neural receptor protein-tyrosine kinase
atctgtgtgcgagtgcgtgtgcgtgcgtgtgtgtgtgtgtgtgtgtgtgtgtgtgtgtgtgtgtgagcgtgtgtgtttttggatttcatactaattttctggagtttctgcccctgctctgcgtcagccctcacgtcacttcgccagcagtagcagaggcggcggcggccgccggttagagcccagtcgctgcttcagctgctgttgctgcttctgcggcgctctgctccctgcgctggctacgggaggccgggggagccgcgccgacagtcctctgtggccagggccggcactgtcctgctaccgcagttgctccccagccctgaggtgcgcaccgatatcgatatccgtgccggtttagcggttctgcgacccaaagagtccagggagagccaccgagtggcgcctggcgtataggaccatgcagccgccttgtggcttggagcagcggcccgtgatgttccagccactgtgaaccatttggtcagcgccaacctgctcagccccagcaccgacaggctcagcctctggtacgctcctctcggcgggaggccatcagcaccaagcagcaagagggctcagggaaggcctcccccctccggcgggggacgcctggctcagcgtagggacacgcactctgactgactggcactggcagctcgggatgtcgccctggccgaggtggcatggacccgccatggcgcggctctggggcttatgcttgctggtcttgggcttctggagggcttctcttgcctgccccatgtcctgcaaatgcagcaccactaggatttggtgtaccgagccttctcctggcatcgtggcatttccgaggttggaacctaacagcattgacccagagaacatcaccgaaattctcattgcaaaccagaaaaggttagaaatcatcaatgaagatgatgtcgaagcttacgtggggctgaaaaaccttacaattgtggattccggcttaaagtttgtggcttacaaggcgtttctgaagaacggcaacctgcggcacatcaatttcactcgaaacaagctgacgagtttgtccaggagacatttccgccaccttgacttgtctgacctgatcctgacgggtaatccgttcacgtgttcctgtgacatcatgtggctcaagactctccaggagacgaaatccagccccgacactcaggatttgtattgcctcaatgagagcagcaagaatacccctctggcgaacctgcagattcccaattgtggtctgccgtctgcacgtctggccgctcctaacctcacggtggaggaagggaagtctgtgaccatttcctgcagcgtcgggggtgacccgctccccaccttgtactgggacgttgggaatttggtttccaaacacatgaatgaaacaagccacacacagggctccttaaggataacaaacatttcatcggatgacagtgggaaacaaatctcttgtgtggcagaaaacctcgtcggagaagatcaagactctgtgaacctcactgtgcattttgcaccaaccatcacatttctcgaatctccaacctcagaccaccactggtgcatcccattcactgtgagaggcaaccccaagccagcacttcagtggttctacaacggagccatactgaatgaatccaagtacatctgtaccaaaatacacgtcaccaatcacacggagtaccacggctgcctccagctggataaccccactcatatgaataatggagactacaccctaatggccaagaatgaatatgggaaggacgagagacagatttctgctcacttcatgggccggcctggagttgactatgagacaaacccaaattaccctgaagtcctctatgaagactggaccacgccaactgacatcggggatactacaaacaaaagtaatgagatcccctccacggatgttgctgaccaaaccaatcgggagcatctctcggtctatgctgtggtggtgattgcctctgtggtaggattctgcctgctggtgatgctgcttctgctcaagttggcgagacattccaagtttggcatgaaaggcccagcttccgtcatcagcaacgacgatgactctgccagccctctccaccacatctccaacgggagcaacactccgtcttcttcggagggcgggcccgatgctgtcatcattgggatgaccaagatccctgtcattgaaaacccccagtacttcggtatcaccaacagccagctcaagccggacacatttgttcagcacatcaagagacacaacatcgttctgaagagggagcttggagaaggagcctttgggaaagttttcctagcggagtgctataacctctgccccgagcaggataagatcctggtggccgtgaagacgctgaaggacgccagcgacaatgctcgcaaggactttcatcgcgaagccgagctgctgaccaacctccagcacgagcacattgtcaagttctacggtgtctgtgtggagggcgacccactcatcatggtctttgagtacatgaagcacggggacctcaacaagttccttagggcacacgggccagatgcagtgctgatggcagagggtaacccgcccaccgagctgacgcagtcgcagatgctgcacatcgctcagcaaatcgcagcaggcatggtctacctggcatcccaacacttcgtgcaccgagacctggccacccggaactgcttggtaggagagaacctgctggtgaaaattggggacttcgggatgtcccgggatgtatacagcaccgactactaccgggttggtggccacacaatgttgcccatccgatggatgcctccagagagcatcatgtacaggaaattcaccaccgagagtgacgtctggagcctgggagttgtgttgtgggagatcttcacctacggcaagcagccctggtatcagctatcaaacaacgaggtgatagaatgcatcacccagggcagagtccttcagcggcctcgcacgtgtccccaggaggtgtacgagctgatgctgggatgctggcagcgggaaccacacacaaggaagaacatcaagaacatccacacactccttcagaacttggcgaaggcgtcgcccgtctacctggacatcctaggctagactccctcttctcccagacggcccttcccaaggcacccctcagacctcttaactgccgctgatgtcaccaccttgctgtccttcgctctgacagtgttaacaagacaaggagcggctctccggggtgaggcagtgcgcacttccccatccacagacagtatcgactcgcttctggctttgtcgctttctctccctttggtttgtttctttcttttgcccattctccatttatttatttatttatttatttatttatttatttatttatttatttatctatctatctatctatttatttatttatttattggtcttcactgcttcatggtcctcggcctctctccttgaccgatctggcttctgtactcctattcactgtacatagacaaaggccttaacaaacctgatttgttatatcagcagacactccagtttgcccaccacaactaacaatgccttgttgtattcctgcctttgatgtggatgaaaaaaagggaaaaaaaataatcaaacatctgacttaaaccgtcacttccgatgtacagacacggggcgtttctatggattcacttctatctatctatttatttatttatctatttatttatttctcttctttgttgttttccggtggttttagcctgtgtatgagaagggaaagtcatgtacagtctgggaaaactttatctgtgggaaatggaaaccagaaggggaaagaagctttaccataaagcacagcaggagtgagacacagaaaagccattggatcagccagagtccgtcctgcataggaaaacccagcagccatcaggctggaggatcatgttcggcactgacccccgaggacctttctgaggaggacacagaatgttaaactctgcatcatggacacagtttccgatcacagatactggccttcaatggaaaaaaaaaaaaaaaaaacccagatagttcttgtgagacctggacagcacgtccaacatccagacattgtggtcgggcacagtgacagagttgatgcatttctcacgggttattctacagagcttttgtcaagtccaatggaaggaggtagattcttgttcagatatgatttcgggaaaaaccgagtccttgacaaagacaggagacaccctcagttgggaggcaagtttctcttaccttggactttctcacacagcaattctcacccccaccccctccactctcacctgtcttgtaactgtgcaaacaaaagtgtgcatggtctttgtcagttgatacctttgtgcacctctgtgcagaaactgctgtctgtcccggctgtggtacccgatcagtggggtagatccacgaaaggtctcattttaggccgctttgggaaggtaaccagatcggtagctggaagcactctccagtaggtggcgaagggtgagtgggtctgctgaagcctgcatatcttcacccacctcaaacccaccgggctgcacaggggacaggcacaggccacccctgagggacagggaagctctcttgggataccacctgagtttacattcagtgtgctcaggtcaagtctctcgctcggggctctgtttcggggagaatggtttcattccaacgcactcattatcaggattctgttttc

SEQ ID NO: 13 - protein, 167 aa, Rattus norvegicus
  Protein tyrosine phosphatase
MNRPAPVEISYENMRFLITHNPANATLNKFTEELKKYGVTTLVRVCDATYDKAPVEKEGIHVLDWPFDDGAPPPNQIVDDWLNLLKTKFREEPGCCVAVHCVAGLGRAPVLVALALIECGMKYEDAVQFIRQKRRGAFNSKQLLYLEKYRPKMRLRSRDTNGHCCVQ

SEQ ID NO: 14 - DNA, 1095 bp, Rattus norvegicus
  Protein tyrosine phosphatase
aaattgcaagcgtattcttttaatgactccagtaaaattaagcatcaagtaaacaaaagtggaaaagaacctacacttttaacttgtctcactagtgcctaaatgtagtttaaaggctgcttaaattttgtgtgtagttggattttttggaagctgaaggtatccatctgcagacattgaggcccaagttgaatttggattcgagtggattcttaacacttctgcctgtgctgaagagaagcttcataaggaacaagcaagttgaatagagaagatagtgatcaataagaggcatttagtggtctttttaatgttttctgctgcgaaacatttcaagatttattgatttttttttttcattttccccaccacactcacacacgcacgctcacactttttatttgccataatgaaccgtccagcccctgtggagatctcgtacgagaacatgcgttttctgataactcacaacccagccaatgcgactctcaacaagttcaccgaggaactcaagaagtacggagtgacaactttggtccgagtttgtgatgctacctatgacaaagctccagttgaaaaagaagggatccacgttctagactggccatttgatgacggagctccgccccctaatcagatagtagatgattggctaaacctgttaaagaccaaattccgggaagaaccaggctgctgtgtcgcagtgcattgtgttgcaggattgggaagggctcctgtgctagttgcacttgcactgattgaatgcggaatgaagtatgaagatgctgttcagtttataagacaaaaaagaagaggagcattcaattccaaacagctgctttacttggagaaataccgacctaagatgcgattacgctccagagataccaacgggcactgctgtgttcagtagaagcagaggaaggccggctggatcgtggcattagagggaactctgggtacctggaaatgtgaatctggattcttacctgtgtcatcaaagtagtgatggattccgtactcctcgactcctcatgattgagaagaaggcaaacgataaagaaatccctctataacacgaataaaatgtttaag

SEQ ID NO: 15 - protein, 1436 aa, Rattus norvegicus
  Receptor protein tyrosine phosphatase-lambda
MARAQALVLALTFQFCAPETETPAAGCTFEEASDPVVPCEFSQAQYDDFQWEQVRIHPGTRTPEDLPHGAYLMVNASQHTPGQRAHIIFQTLSENDTHCVQFSYFLYSRDGHSPGTLGVYVRVNGGPLGSAVWNMTGSHGRQWHQAELAVSTFWPNEFQVLFEALISPDHKGYIGLDDILLFSYPCAKAPHFSRLGDVEVNAGQNASFQCMAAGRAAEAEHFFLQRQSGVLVPAAGVRHISHRRFLATFPLASVGRSEQDLYRCVSQAPRGAGVSNFAELIVKEPPTPIAPPQLLRAGPTYLIIQLNTNSIIGDGPIVRKEIEYRMARGPWAEVHAVNLQTYKLWHLDPDTEYEISVLLTRPGDGGTGRPGPPLISRTKCAEPTRAPKGLAFAEIQARQLTLQWEPLGYNVTRCHTYAVSLCYRYTLGGSHNQTIRECVKMERGASRYTIKNLLPFRNIHVRLILTNPEGRKEGKEVTFQTDEDVPGGIAAESLTFTPLEDMIFLKWEEPQEPNGLITQYEISYQSIESSDPAVNVPGPRRTISKLRNETYHVFSNLHPGTTYLFSVRARTSKGFGQAALTEITTNISAPSFDYADMPSPLGESENTITVLLRPAQGRGAPISVYQVVVEEERPRRLRREPGAQDCFSVPLTFETALARGLVHYFGAELAASSLLEAMPFTVGDNQTYRGFWNPPLEPRKAYLIYFQAASHLKGETRLNCIRIARKAACKESKRPLEVSQRSEEMGLILGICAGGLAVLILLLGAIIVIIRKGKPVNMTKATVNYRQEKTHMMSAVDRSFTDQSTLQEDERLGLSFMDAPGYSPRGDQRSGGVTEASSLLGGSPRRPCGRKGSPYHTGQLHPAVRVADLLQHINQMKTAEGYGFKQEYESFFEGWDATKKKDKLKGGRQEPVSAYDRHHVKLHPMLADPDADYISANYIDGYHRSNHFIATQGPKPEMIYDFWRMVWQEQCASIVMITKLVEVGRVKCSRYWPEDSDMYGDIKITLVKTETLAEYVVRTFALERRGYSARHEVRQFHFTAWPEHGVPYHATGLLAFIRRVKASTPPDAGPIVIHCSAGTGRTGCYIVLDVMLDMAECEGVVDIYNCVKTLCSRRVNMIQTEEQYIFIHDAILEACLCGETTIPVNEFRATYREMIRIDPQSNSSQLREEFQTLNSVTPPLDVEECSIALLPRNRDKNRSMDVLPPDRCLPFLISSDGDPNNYINAALTDSYTRSAAFIVTLHPLQSTTPDFWRLVYDYGCTSIVMLNQLNQSNSAWPCLQYWPEPGRQQYGLMEVEFVSGTANEDLVSRVFRVQNSSRLQEGHLLVRHFQFLRWSAYRDTPDSRKAFLHLLAEVDKWQAESGDGRTVVHCLNGGGRSGTFCACATVLEMIRCHSLVDVFFAAKTLRNYKPNMVETMDQYHFCYDVALEYLEALELR

SEQ ID NO: 16 - DNA, 5732 bp, Rattus norvegicus
  Receptor protein tyrosine phosphatase-lambda
gttgactactcagctgccagaacatccaatctggctcctgcaactttagaccaacatattgtgtttgatcttctcctgaacaacttgggagatacgtctgatcttcagcttggtacatacagttgcgcagtgaatggcacttacgtgttcattgtgcacatgctaaagctggcatgattaatgttcgactgctatgtcaacctgattaacaatgaggatgtcttggtgtcagctatgccaacgatggtgctccagaccggcgccagtcccgctccgcgcggcactgtccactacggctcccgctcgccttgggctcccggtcgggctccggaggcgtcgcctccccagctgcgggtctccaggacctaggcggcggccatggcccgggctcaggctctggtcctggcgctcaccttccagttctgcgcgcctgagaccgagactcccgcagctggctgcaccttcgaggaggcgagtgacccggtcgtgccctgcgagttcagccaggctcagtatgacgacttccaatgggagcaagtgcggatccaccccggcacccggacccctgaagacctgccccatggtgcctacttgatggtcaatgcttctcagcataccccaggtcagagggcccacatcatcttccagaccctgagcgagaacgacacccattgtgtgcagttcagctacttcctgtacagcagggatgggcacagcccaggcaccctgggggtctacgtgcgcgtgaatgggggccctctgggcagtgccgtgtggaatatgaccggatcccacggccgtcagtggcaccaggctgagctggctgtcagcaccttctggcccaatgagtttcaggtgctgtttgaggccctcatctccccagaccacaagggctacataggcttagacgacatcttgctcttcagctatccctgcgcaaaggcccctcacttctcccgccttggggacgtggaggtcaatgcaggccagaacgcatccttccaatgcatggcagcaggcagagccgcagaggcagaacacttcttcctgcagcgtcagagtggagtgctggtgcctgcggccggggtgcggcacatcagtcaccgtcgcttcctggccacttttccgctggcctcggtaggccgctcagagcaggatctgtaccgttgcgtgtcccaggccccgcgtggtgctggcgtctccaactttgcagagctcatcgtcaaagagcctcccacccccatcgcgcccccacagctgctgcgtgcaggccccacctacctcattatccagctcaacaccaactccatcattggcgacgggccgatcgtgcgcaaggagatcgagtaccgcatggcacggggcccgtgggccgaggtgcacgctgtcaacctgcagacctacaagctgtggcatctggacccagacactgagtatgaaatcagcgtgctgctcacacgcccgggagatggaggcacaggccgccctgggccaccactgatcagccggaccaagtgcgcagagcccacgagggcccccaaaggtctggcttttgctgagatccaggctcgccagctgaccctgcagtgggagcccctgggctataatgtcacacgttgtcatacctacgctgtgtccctttgctatcgctacaccctgggcggcagccacaaccagaccatccgggagtgtgtgaagatggagcggggtgccagccgctacaccatcaagaatctgctgccattcagaaacatccacgtgcgtctgattctcacaaaccctgaggggcgcaaggagggcaaggaggtcaccttccagacagatgaagatgtgcctggtgggattgcagctgagtccctaaccttcactccactggaggacatgatctttctcaagtgggaggagccccaggagcccaatggcctcatcactcagtatgagatcagctaccaaagcattgagtcctcagacccagcagtgaacgtgcccggcccgagacgcaccatctccaaactccggaatgagacttaccacgtcttctccaacctgcatcccggcaccacgtatctgttctccgtgcgtgctcggacgagcaagggcttcggccaggcggctctcactgagataaccaccaacatctcagctcccagctttgattatgccgacatgccgtcacccctgggcgagtccgagaacaccatcactgtgctgttgaggccggcccagggccgaggagcccccatcagcgtctaccaggtggttgtggaggaagagcggccacggcgcttgcggcgggagcccggagctcaggactgcttctcggtacctctgacctttgagacggccctggctcgcggcctggtgcactactttggggctgaactggctgccagcagcctgcttgaggccatgcccttcaccgtgggtgacaaccagacctatcgtggcttctggaacccaccgcttgagcccagaaaggcctatctcatctatttccaggcagcaagccacctgaaaggggaaacccgactgaactgcatccgaattgccaggaaagctgcgtgcaaggagagcaagcgacccctcgaagtgtcccagagatcggaggagatggggctcatcctgggcatctgtgcaggtggtcttgccgtcctcattctcctcctgggggccatcattgtcatcatccgcaaagggaagccagtgaacatgacgaaagccacggtcaactaccgccaggagaagactcacatgatgagtgccgtggaccgcagcttcacagatcagagtactctgcaggaggatgagcggttgggtctgtcctttatggatgctcctggctatagtcctcgtggagaccagcgaagcggtggtgtcaccgaggccagcagcctcctggggggttctccaaggcgcccatgcggccggaagggttctccgtatcataccgggcagctccaccctgcagtccgagtggctgaccttctacagcacatcaaccagatgaagacagccgagggctacggcttcaagcaggagtacgagagtttctttgagggctgggacgccaccaagaagaaagacaagctcaagggcggccgacaggagccagtgtctgcctatgatcgacaccatgtgaaactacacccgatgctggcagaccctgatgccgactacatctctgccaactacatagacggctaccacaggtcaaaccacttcatagccactcaagggccaaagcctgagatgatctacgatttctggcgcatggtgtggcaggaacagtgtgcgagcatcgtcatgatcaccaagctggtagaggtgggcagggtgaagtgttctcgctactggcctgaggactcagacatgtatggggacatcaagatcacgctggtaaagacagagacactggctgagtatgtggtgcgcacctttgccctggagcggagaggttactcagcccggcatgaggtccgccagttccatttcacagcgtggccagagcatggtgtcccctaccacgccacggggctgctggccttcatccggcgtgtgaaggcttccactccacctgatgccgggcccattgtcattcactgcagtgcaggaactggccgcacaggctgctacatcgtcctggatgtgatgctggacatggctgaatgtgagggggtcgtggacatttacaactgtgtgaagaccctctgttcccgacgggtcaacatgatccagacggaggaacaatatatcttcatccacgatgcaatcttggaggcctgcctgtgtggggagaccaccatccctgtcaacgagttcagggccacctacagggagatgatccgcattgaccctcagagcaattcctcccagcttcgggaagagttccagacgctgaactcggtcacgccgccgctggatgtggaggagtgtagcattgccctgctgccccggaatcgagacaagaaccgtagcatggatgtgctgccaccagaccgctgcctgcccttcctcatctccagtgatggggaccccaataactacatcaatgcagcactgactgacagctacacacggagcgccgccttcatcgtgaccctgcacccgctgcagagtaccacgcccgacttctggcggctggtctacgactacgggtgcacctccatcgtcatgctgaaccaacttaaccagtccaactccgcctggccctgcttgcagtactggccggagccaggccgacagcagtatgggctcatggaggtggagtttgtgtctggcacagcaaacgaggatttggtgtcccgagtgttccgggtgcagaactcttctcggctgcaggagggtcacctgctggtacggcacttccagtttctgcgttggtctgcttatcgggacacgcctgactccaggaaggcctttctgcacctgttggctgaggtggacaagtggcaggcagagagtggggatgggcgcaccgtggtgcattgtctcaacgggggtggccgcagtggcaccttctgcgcctgtgccacggtcttggagatgatccgctgtcacagcctggtggatgttttctttgctgccaaaacacttcggaactacaagcccaatatggtggagaccatggatcagtatcatttctgctacgacgtggccctggagtacctggaggctctggagttgagatagcaggcgcctgacctggggcacccagtgaacacccagggcatggcccatcatcccagatgaggagggcctgtggccccaactttgctcagccataattccacagggacaacactggaacggacggacactgcaccatcttggtgacccccacgggaaggctgcaggccaaggagaagctttgcaagactgtatcagccccacctctagagggccctgcagacctgtgcagagaagctcgcctggaccaaaatagctagtgctggagagcacaggccaggcccctctgctccatcacagtccttggccagaaatgaatgagtgtctgcagagagcacccatggtttgcacccagtatggtcctttctgcacgtggtggaggctcactgggacttggcaggggctgagtccccgagagtcctgaagctgggactcttccccgtctcgccggtgggacccgctgagcatcctgcagctccattctccatccccactgcccctacagacctggggtgctttgctcgctttcctcctgcttctgagcttttcctgcaacaggacccgtgcctccttcctgggctccatccctgcctggcccagtatatgcagaatgatatacttcagctccttcttcccctggcctttgggtctccatggttcagtcctgctcagcttgggcctgtgacaatccacaaggctgaatcacagcccctggggttgaggtccctgtggctcttggtgaggctgccactggatcggggcaggctagaacagggctggtgtcagctcctagagtacagaggaagaagggatactttggaatggaggaccagtgctttttttgttgttgttattttgttatttttttgatgggagggtgggaagttctctttataatggggtaggccacacccccatttcgtgcctcaatttccccatctgtaaactgtagatatgactactgacctacctcacagggggctgtggggaggtgtaaggtaatgtttgtaaagcgctttgtaaataaatgtgctctctgaatgcca

SEQ ID NO: 17 - protein, 525 aa, Rattus norvegicus
  Calcineurin A-beta
MAAPEPARAAPPPPPPPPPPLGADRVVKAVPFPPTHRLTSEEVFDMDGIPRVDVLKNHLVKEGRVDEEIALRIINEGAAILRREKTMIEVEAPITVCGDIHGQFFDLMKLFEVGGSPANTRYLFLGDYVDRGYFSIECVLYLWVLKILYPSTLFLLRGNHECRHLTEYFTFKQECKIKYSERVYEACMEAFDSLPLAALLNQQFLCVHGGLSPEIHTLDDIRRLDRFKEPPAFGPMCDLLWSDPSEDFGNEKSQEHFSHNTVRGCSYFYNYPAVCEFLQNNNLLSIIRAHEAQDAGYRMYRKSQTTGFPSLITIFSAPNYLDVYNNKAAVLKYENNVMNIRQFNCSPHPYWLPNFMDVFTWSLPFVGEKVTEMLVNVLSICSDDELMTEGEDQFDVGSAAARKEIIRNKIRAIGKMARVFSVLREESESVLTLKGLTPTGMLPSGVLAGGRQTLQSATVEAIEAEKAIRGSSPPHRICSFEEAKGLDRINERMPPRKDAVQQDGFNSLNTAHTTENHGTGNHSAQ

SEQ ID NO: 18 - DNA, 2266 bp, Rattus norvegicus
  Calcineurin A-beta
cccgcccggcccggcacctagccgagccccgggcccagcatggccgccccggagccggcccgggccgcgccgccccctcccccgcccccgccgccccccctcggggccgaccgcgtcgtcaaagccgttccttttcccccaactcaccggttgacatctgaagaagtgtttgatatggatgggatacccagggttgatgttctgaagaaccatctggtaaaagaaggtcgggtagatgaagaaattgcactaagaattatcaatgagggtgctgccatacttaggcgggagaaaaccatgatagaagtagaagctccaattacagtgtgtggtgacatccatggccaattttttgatctgatgaaactttttgaagtaggaggatcacctgctaatacacgatacctttttcttggtgattatgtggacagaggttattttagtatagagtgtgtcttgtatttatgggtcttgaagattctatacccaagcacattattccttctgagaggcaaccatgaatgcagacacctcactgagtattttacctttaagcaggaatgtaaaattaagtattcagaaagggtctatgaagcttgtatggaggcttttgacagcttgccccttgctgcacttctaaaccaacaatttctttgtgttcatggtggactttcaccagagatacacacactggatgatattaggagattagatagatttaaagagccacctgcatttggaccaatgtgtgacttgctgtggtctgatccttctgaagactttggaaatgaaaaatcacaagaacattttagtcataatacggttcgaggatgttcttatttttataactatccagcagtgtgtgaatttttgcaaaacaataatttgttatcgattattagagctcatgaagctcaagatgcaggctatagaatgtacagaaaaagtcaaactacagggtttccttcattaataacaattttttcggcacctaattacttagatgtctacaataataaagctgctgtactaaagtatgagaacaatgtgatgaacatccgccagtttaactgttctccacatccttactggttgcccaattttatggatgtctttacatggtctttaccatttgttggagaaaaagtcacagagatgttggtaaatgttctcagtatttgctctgatgatgaactaatgacagaaggggaagaccagtttgatgtaggttcagctgcagcccggaaagaaatcataagaaacaagatccgagcaattggcaagatggcaagagtcttctctgttctcagggaggagagtgaaagcgtgctgacactcaagggcctgactcccacagggatgttgcctagtggagtgttggctggaggacggcagaccttgcaaagtgccacagttgaggctattgaggctgaaaaagcaatacgaggatcctctccaccacatagaatctgcagttttgaagaggcaaagggtttggataggatcaatgagagaatgccaccccggaaagatgctgtgcagcaagatggtttcaattccctgaacaccgcacataccactgagaaccacgggactggcaaccatagtgcccagtgaccagcggcttcccagggatggacagatcactaaggagccggaggggtcggccgagctgatgataaatgtcataatctctctgaagaaacaaaccattgtgctttttgagacccttgcccccttcccggatggaggcttgagggccttgggacttgtgctgtccataagattggggaatcgctgccacagcggagagcagtgagcaaggggcttggggcaaattccagtggaggaagcccaaacctccatttatgcttgtggttcacacatttacgtttacaaatgagatttcctttgttttctccctcagtagaattagatttttttcaaccatgactttaaatgcaatctttagagttaatgtggaacctccctcacccccaccccatgaaatgtctttaagaggatggattagcatggtcttaaaatatatttctgaggttactagatgtattttgaattgtagacaaaatctgagaaacccagttggtgtttatataaaaacgctgacctcaggtcatagttcttaaatgtggctaattctgtaacatagtcttggtatttttcaattatgaatgcataaactatttctaagaagactcttacttgaacaagatccaaaaaaccaatttagatcctttttgccccc

SEQ ID NO: 19 - protein, 564 aa, Rattus norvegicus
  Phosphodiesterase, cAMP-specific
MKEQGGTVSGAGSSRGGGDSAMASLQPLQPNYLSVCLFAEESYQKLAMETLEELDWCLDQLETIQTYRSVSEMASNKFKRMLNRELTHLSEMSRSGNQVSEYISNTFLDKQNDVEIPSPTQKDREKKKKQQLMTQISGVKKLMHSSSLNNTSISRFGVNTENEDHLAKELEDLNKWGLNIFNVAGYSHNRPLTCIMYAIFQERDLLKTFKISSDTFVTYMMTLEDHYHSDVAYHNSLHAADVAQSTHVLLSTPALDAVFTDLEILAAIFAAAIHDVDHPGVSNQFLINTNSELALMYNDESVLENHHLAVGFKLLQEEHCDIFQNLTKKQRQTLRKMVIDMVLATDMSKHMSLLADLKTMVETKKVTSSGVLLLDNYTDRIQVLRNMVHCADLSNPTKSLELYRQWTDRIMEEFFQQGDKERERGMEISPMCDKHTASVEKSQVGFIDYIVHPLWETWADLVQPDAQDILDTLEDNRNWYQSMIPQSPSPPLDERSRDCQGLMEKFQFELTLEEEDSEGPEKEGEGPNYFSSTKTLCVIDPENRDSLEETDIDIATEDKSLIDT

SEQ ID NO: 20 - DNA, 2647 bp, Rattus norvegicus
  Phosphodiesterase, cAMP specific
gtcttgtcatcaggagacctcattttacctctaggttaagggagagaatctatgaagagaaaggaatagtctgtgtctcggtcttgtccgggtcagtgtttctgagagctcacagtggccacctgaagcatttttccccagaatgaatgactgccctgcctgagaacagaagagccaaacagttccccccacatggccatagggagctggtttcatttagaagaaaagcaaagagaggggaaagcctccctcatttctcctccggacggcaaacattcagaaatgacatcacacaccccacagccccgggatgactaaggcagaagtagcctgagaaaactctgctctgccctgagttttagggcacagttatgcagatgagcgtctgggcgcaggttcccgccttcttcctctgaggaagtttcttggtagatcactgacacctcatcccggcgagggggtgaaaacttggcaccagccactccccctcccgggcagagcaccagaaagagcttggaagcaaggagtcggcaagcaaacaatgaaggagcaagggggcaccgtcagtggcgccgggagcagccgaggcggaggagactcggctatggccagcctgcagccgctgcagcctaactacctgtctgtgtgtttgtttgcagaagaatcatatcagaaactagcaatggagacgctggaggaactagactggtgcctagaccagctagagaccatccagacctaccgctctgtcagcgagatggcttcaaacaagttcaaaaggatgctgaaccgggagctgacacacctctcagagatgagcagatcagggaaccaagtgtctgaatacatttcgaacacgttcttagacaagcagaacgatgtggaaatcccatctcccacccagaaggacagggagaagaagaagaagcagcagctcatgacccagataagtggagtgaagaaactgatgcacagctcaagcctgaacaacacaagcatctcacgctttggagtcaacacggaaaatgaggatcatctagccaaggagctggaagacctgaacaaatggggccttaacatcttcaacgtggctgggtactcccataatcggcccctcacatgcatcatgtacgccattttccaggaaagagaccttctaaagacgtttaaaatctcctccgacaccttcgtaacctacatgatgactttagaagaccattaccattctgatgtggcgtatcacaacagcctgcacgctgctgacgtggcccagtcaacgcacgttctcctctctacgccagcactggatgctgtcttcacagacctggaaatcctggctgccatttttgcagctgccatccatgatgttgatcatcctggagtctccaatcagtttctcatcaatacaaattccgaacttgctttgatgtataatgacgaatctgtgctggaaaaccatcacctcgctgtgggattcaagctccttcaagaggaacattgcgacatctttcagaatcttaccaagaagcaacgccagacactcaggaaaatggtgattgacatggtgttagcaactgatatgtccaagcacatgagcctcctggctgaccttaaaacgatggtagaaaccaaaaaggtgacgagctccggtgttctcctcctggacaactatactgaccggatacaggttcttcgcaacatggtacattgtgcagacctgagcaaccctaccaagtccttggagttgtatcggcaatggactgatcgcatcatggaggagtttttccaacagggagacaaagaacgggagaggggaatggagattagcccaatgtgtgataaacacacagcttctgtggaaaagtcccaggttggtttcattgactacattgtccatccattgtgggagacctgggcagacctggttcagcctgatgctcaagacattttggacacactagaagataacaggaactggtaccagagtatgattccccagagcccctctccaccactggacgagaggagcagggactgccaaggccttatggagaagtttcagttcgaactgacccttgaagaagaggattctgaaggaccggaaaaggagggagaaggccccaactatttcagcagcacaaagacactttgtgtgatcgatccagagaacagggattctctggaagagactgacatagacattgccacagaagacaagtctctgatcgacacataatctccctctgtgtggaggtgaacattctatccttgacgagcatgccagctgagtggtagggcccacctaccagagccaaggcctgcacaaaacaaaggccacctggctttgcagttacttgagtttggagccagaatgcaaggccgtgaagcaaatagcagttccgtgctgccttgccttgccggcgagcttggcgagacccgcagctgtagtagaagccagttcccagcacagctaaatggcttgaaaacagaggacagaaagctgagagattgctctgcaataggtgttgaggggctgtcccgacaggtgactgaactcactaacaacttcatctataaatctcacccatcctgttgtctgccaacctgtgtgccttttttgtaaaatgttttcgtgtctttgaaatgc

SEQ ID NO: 21 - protein, 416 aa, Rattus norvegicus
  Neurotensin receptor type 2
METSSPWPPRPSPSAGLSLEARLGVDTRLWAKVLFTALYSLIFAFGTAGNALSVHVVLKARAGRPGRLRYHVLSLALSALLLLLVSMPMELYNFVWSHYPWVFGDLGCRGYYFVRELCAYATVLSVASLSAERCLAVCQPLRARRLLTPRRTRRLLSLVWVASLGLALPMAVIMGQKHEVESADGEPEPASRVCTVLVSRATLQVFIQVNVLVSFALPLALTAFLNGITVNHLMALYSQVPSASAQVSSIPSRLELLSEEGLLGFITWRKTLSLGVQASLVRHKDASQIRSLQHSAQVLRAIVAVYVICWLPYHARRLMYCYIPDDGWTNELYDFYHYFYMVTNTLFYVSSAVTPILYNAVSSSFRKLFLESLGSLCGEQHSLVPLPQEAPESTTSTYSFRLWGSPRNPSLGEIQV

SEQ ID NO: 22 - DNA, 1529 bp, Rattus norvegicus
  Neurotensin receptor type 2
tgagtgagagggagggagctcaggccaccacgagacagagatggagaccagcagtccgtggcctccgaggcccagccccagcgcagggctgagcctggaggcgcggctgggcgtggacactcgcctctgggccaaggtgctgttcaccgcgctctactcgctcatcttcgcatttggcacagcgggcaatgcgctgtccgtgcacgtggtgctgaaggcgcgggccggtcgccccgggcgcctgcgctaccacgtgctcagcctggcgctctcagccctgctgctactgctggtcagcatgcccatggagctctacaacttcgtgtggtcccactacccatgggtcttcggcgatctgggctgccgtggctattacttcgtgcgcgagctgtgcgcctacgccacagtgctgagcgttgccagcctaagcgcagagcgctgcctggccgtgtgccagccgctgcgcgcccgccgccttctcaccccgcgccgcacccgccgcctgctgtcactggtctgggtcgcctctctgggccttgccctgcccatggcggttatcatgggacagaagcacgaagtggaaagcgcggacggggagcctgagcctgcctcgcgtgtgtgcacggtgctggtgagccgcgccacacttcaggtcttcatccaggtgaatgtgctggtgtccttcgctctccccttggcactcactgctttcctgaatggcatcactgtcaaccacctgatggccctctactcccaggtaccatcagcttctgcccaagtcagctccatccccagccgcctggagctcctgagtgaggaaggcctcctgggcttcatcacgtggagaaagactctctccctgggggtccaagccagcctggtgagacacaaggatgccagccagatccgcagcctccagcacagcgcccaggttctcagagccatcgtggctgtgtatgtcatctgctggctgccgtaccatgcccgccgactcatgtactgctacatccccgatgatggatggactaatgagctctatgatttctatcactatttctacatggtgaccaacacgctcttctatgtcagctcagcagtgaccccaatcctctacaacgccgtgtcttcctccttcagaaagctcttcctggaatccctcggctccctgtgtggtgaacagcactccttggtgcccttaccccaagaagccccagagtcaaccactagtacgtacagtttccggctttggggatccccaagaaaccccagcctgggagaaatacaagtatgaagagaacaaacaatggctgcttgggacatgcccgtcagacaagccatgccatcactaacagtccaggtggacctactgacccagtgcatactgcaggcaaaccacataacacctactgccctcagcttcccacagagaacaacagagttgaagaataggaaccgtggcctagtgatgaaggtgcccagtgccaggcctggtacatagtcactactcaataaattttaacccggtgctg

SEQ ID NO: 23 - protein, 570 aa, Mus musculus
  Second subunit of the interleukin 1 receptor complex
MGLLWYLMSLSFYGILQSHASERCDDWGLDTMRQIQVFEDEPARIKCPLFEHFLKYNYSTAHSSGLTLIWYWTRQDRDLEEPINFRLPENRISKEKDVLWFRPTLLNDTGNYTCMLRNTTYCSKVAFPLEVVQKDSCFNSAMRFPVHKMYIEHGIHKITCPNVDGYFPSSVKPSVTWYKGCTEIVDFHNVLPEGMNLSFFIPLVSNNGNYTCVVTYPENGRLFHLTRTVTVKVVGSPKDALPPQIYSPNDRVVYEKEPGEELVIPCKVYFSFIMDSHNEVWWTIDGKKPDDVTVDITINESVSYSSTEDETRTQILSIKKVTPEDLRRNYVCHARNTKGEAEQAAKVKQKVIPPRYTVELACGFGATVFLVVVLIVVYHVYWLEMVLFYRAHFGTDETILDGKEYDIYVSYARNVEEEEFVLLTLRGVLENEFGYKLCIFDRDSLPGGIVTDETLSFIQKSRRLLVVLSPNYVLQGTQALLELKAGLENMASRGNINVILVQYKAVKDMKVKELKRAKTVLTVIKWKGEKSKYPQGRFWKQLQVAMPVKKSPRWSSNDKQGLSYSSLKNV

SEQ ID NO: 24 - DNA, 3355 bp, Mus musculus
  Second subunit of the interleukin 1 receptor complex
cattgtgctctaaagctgccagcatctggctttcctaggttcggcttggaccattgtgctgaaagaggcagtggtcggccaccctgcatccatctggtcgctgtcgccgagcctgctgggctggcccgataaggatgggacttctgtggtatttgatgagtctgtccttctatgggatcctgcagagtcatgcttcggagcgctgtgatgactggggactagataccatgcgacaaatccaagtgtttgaagatgagccggctcgaatcaagtgccccctctttgaacacttcctgaagtacaactacagcactgcccattcctctggccttaccctgatctggtactggaccaggcaagaccgggacctggaggagcccattaacttccgcctcccagagaatcgcatcagtaaggagaaagatgtgctctggttccggcccaccctcctcaatgacacgggcaattacacctgcatgttgaggaacacaacttactgcagcaaagttgcatttcccctggaagttgttcagaaggacagctgtttcaattctgccatgagattcccagtgcacaagatgtatattgaacatggcattcataagatcacatgtccaaatgtagacggatactttccttccagtgtcaaaccatcggtcacttggtataagggttgtactgaaatagtggactttcataatgtactacccgagggcatgaacttgagctttttcatccccttggtttcaaataacggaaattacacatgtgtggttacatatcctgaaaacggacgtctctttcacctcaccaggactgtgactgtaaaggtggtgggctcaccaaaggatgcattgccaccccagatctattctccaaatgaccgtgttgtctatgagaaagaaccaggagaggaactggttattccctgcaaagtctatttcagtttcattatggactcccacaatgaggtctggtggaccattgatggaaagaagcctgatgacgtcacagtcgacatcactattaatgaaagtgtaagttattcttcaacggaagatgaaacaaggactcagattttgagcatcaagaaagtcaccccggaggatctcaggcgcaactatgtctgtcatgctcgaaataccaaaggggaagctgagcaggctgccaaggtgaaacagaaagtcataccaccaaggtacacagtagaactcgcctgtggttttggagccacggtctttctggtagtggttctcattgtggtttaccatgtttactggctggagatggtcctcttttaccgagctcactttggaacagatgaaacaattcttgatggaaaggagtatgatatttatgtttcctatgcaagaaatgtggaagaagaggaatttgtgctgctgacgctgcgtggagttttggagaatgagtttggatacaagctgtgcatcttcgacagagacagcctgcctgggggaattgtcacagatgagaccctgagcttcattcagaaaagcagacgactcctggttgtcctaagtcccaactacgtgctccagggaacacaagccctcctggagctcaaggctggcctagaaaatatggcctcccggggcaacatcaacgtcattttagtgcagtacaaagctgtgaaggacatgaaggtgaaagagctgaagcgggctaagacggtgctcacggtcattaaatggaaaggagagaaatccaagtatcctcagggcaggttctggaagcagttgcaggtggccatgccagtgaagaagagtcccaggtggtctagcaatgacaagcagggtctctcctactcatccctgaaaaacgtatgaaaggagaagtgagggggtacaaagaacaaggcggttcatgggaggaagggccccctctttccttctaggctgtggcttcatagacagaaaaagagtcctgtctaagccccctgggaggaaaatattccgggactgtacgcctggcagctctgcctctcagcaatactaagcgttacagtgatggactccacagtccgccaccagttctaaaagtcattttgatctttacaagtaaagatgtgtctgatgcacccccacctctgttcttccctcttttctaatctcttcgtaaaaatctcacctctatggaactgctttgcccagtgactcaaaactctgtttaaagatactttacctgctgacaggagtatcgcctgtttctcagtaggacactcctttaattttctcttctcttccgtcatccattaagcatgtaatcagggactaaatctgtgtgagctgaggctatttcactcctttgcttctgtgtctgttgaatctaccacctaagcaagactaacagtcaaactgcagctgttcctcgtgactgattaagcgacatactgccttcctgctactaaaccccattcgctctcatctcaggtaatggagatcatatttataaacttgaaaaagccatggcttttgttttatcatagtaatttctcatctgtctacagatagacaggtcggtacttgttccttcctttccctacctattggttctgtcactcatatctcataggcagcatcacgcttgctgcggtctgcggggaagctttaatggtgctaatggagagtgagaaaatccaaaagcgctctcagggcatttttcacatgggaagagagcacagaagagaatgcttggcggtttgtttgttaattctgaccctagaggggaaaaccaggaaaagtggttaatcctcactccttcacacacctcttcattatgaagtggaggtgagaggtactgagtttccttttggcattactattccaaaaggaatgattattcatggtaattaattgtgcagtgcctgtagtaccttgctccaaatggatcaccctgcaaatcattaataatgaagtggttttattagtttcaagcagaatttcactatttctcagacttccaaaagtgaaaggcaagtataacattcacatttagagaggccaatttctatttcatatctaacatgtatatatatgtatatacatatatacatatatatatgatctctgtacacataaattttatatgtctatgtatatagaagtatccacaaatgacatgtgtgtgtgtatatccacctgcctataaattatctctgtgtattattttgggctatacataatcacacacatacatctttcagtagtcattggcaaaatattgaaagccagtagaactagtgttcaatctttaaattatgttaatagtgttatggttttgtgttgatattttcatttcatttcatttctgttccatttgtgaattccctttagag

SEQ ID NO: 25 - protein, 504 aa, Rattus norvegicus
  Amino acid transporter system A
MKKTEMGRFNISPDEDSSSYSSNGDFNYSYPTKQAALKSHYVDVDPENQNFLLESNLGKKKYETDFHPSTTSFGMSVFNLTNAIVGNGILGLSYAMANTGIALFIILLTFVSIFSLYSVHLLLKTANEGGSLLYEQLGHKAYGLAGKLAASGSITMQNIGAMSSYLFIVKYELPLVIKALMNIEDTNGLWYLNGDYLVLLVSFVLILPLSLLRNLGYLGYTSGLSLLCMIFFLIVVICKKFQIPCPVEVALMANETVNGTFTQVALAALASNSTAADTCRPRYFIFNSQTVYAVPILTFSFVCHPAVLPIYEELKSRSRRRMMNVSKISFFAMFLMYLLAALFGYLTFYEHVESELLHTYSAIVGTDILLLVVRLAVLVAVTLTVPVVIFPIRSSVTHLLCPTKEFSWFRHSVITVTILAFTNLLVIFVPTIRDIFGFIGASAAAMLIFILPSAFYIKLVKKEPMRSVQKIGALCFLLSGVVVMIGSMGLIVLDWVHDASAGGH

SEQ ID NO: 26 - DNA, 4632 bp, Rattus norvegicus
  Amino acid transporter system A
ccacgcgtccgcgccgtcgcccgcgccaccaccccttagtctctgctggaggatcgtgaccgccattccccgcttttttttttctttttataatctcttgaataattaaatctaagaaagaaaaaaaatccatctcttgtgcctgttggattgcggggattttcttttttttttaatttaaaaaagaaaggaaaaaaaggggggggggactccgaccacacttatttttgcctcgttttacaattctggtgtgaccgagacagcccgcgggagacgctgccgtgaggtgggccagctcgcaggaagagcaccgaggcagcctcgagggccagtgcgccgccaaggacaaaaggaagctcgcgccgcgcgctgaacaccgttcctccggatcagcatgaagaagaccgaaatgggaaggttcaacatctccccggatgaggacagcagcagttacagctccaacggtgacttcaactactcataccccacgaagcaggctgctctaaaaagccattatgtggacgtggaccccgaaaaccagaactttttacttgaatcgaatctggggaagaagaagtacgaaacagactttcatccaagtactacttcctttggaatgtcagtatttaatctgaccaatgcgattgtgggcaatggaatccttgggctttcttatgccatggctaatactggaattgctctttttataattctcttgacgttcgtgtcgattttttctctgtactccgttcacctcctcctcaagactgccaacgaaggagggtctttattatacgaacagttgggacataaggcatacggtctggctgggaagctggcagcctccggatcgattacaatgcagaacatcggagctatgtcaagctacctcttcatagtgaaatatgagttacctttggtgatcaaggcgttaatgaacattgaagatacgaatgggctgtggtatctgaacggcgactatctggtccttctggtgtccttcgtgctcattctcccattgtcactgctgagaaatctaggatacttggggtataccagcggcctttctctgctctgtatgatattctttctgattgtggtgatttgcaagaagtttcagattccttgccctgtggaagtggctttgatggctaacgaaacggtgaatggcacctttacccaggtggctttggcagcgctggcgtccaacagcaccgcagccgatacctgcaggccccgttactttatcttcaactcacagactgtgtatgctgtgcccatcctgacgttttcctttgtctgccatcccgctgtccttcccatctatgaagagctgaagagccgcagccggagaaggatgatgaacgtgtccaagatttctttcttcgccatgtttctgatgtatttgcttgccgccctcttcggatacctgacattttacgagcacgtggagtcagaactgctacatacctactctgcgatcgtgggaactgacattctcctcctcgttgtccgcctggctgtgctggtggctgtcaccctcactgtccccgtcgtcattttcccaatccggagttcggtcactcacttactgtgccctacaaaagagttcagttggttccggcacagtgtcattactgtgacgatcctggccttcaccaatttgctcgtcatctttgtccccactatcagggacatcttcgggttcattggtgcatcggccgctgcaatgctgatcttcatccttccgtctgctttctacatcaagttagtgaagaaagaacccatgagatccgtgcaaaagattggggctctgtgttttctcctgagtggcgtagtcgtgatgattggaagcatgggcttgattgtcctggactgggtccacgatgcctctgcaggcggacattaaccgccccactcaaactgaacggtccatctgcctgccgcgttgggtccactcaactcgctcagacttcacccgatgctttcgggtcacttccttctgaagtgcagcctcctcgctggttcttctggatgcagaataagtgaacttttctttctctttggttttttttttaaaagaagcttatctgtgtgttagggaatggatattaacaccaaaaaccacgagccttgggttaagggaagtgacagtttattccattccagagaatggacggacttttatcaaagccacatgtctggctgtctcattgtttaacttggatattttatgattttacttgaatgtgcctaacggaaccattcgatgtgagaaacacttcttaatttacagcaaagtattgaaataagcattgagaaaaacacttattttttgtaccaaaaaaatactttaaaagacctcagaagcactattttactttgaagaaattgcattttttgaactttatccagaaccagttgtcaataaactccgtaaaacaatttcattgatatttaaaaatgaatattagtattatgaaattatttgccttttttataggcattataagccaaatacttttttaccccaaaatcattttcgggaaaatgttacgcaaagttgcaccatgagttagcatggttttgttttgctcatttcagattcatttgaaggataattggtaattgctgcaccaaatccggtgagcctccctccgttcatcgctgtctttgccttcagataattggttcattaaaactaaaatgtttgtgtcttcaattaggctgggaaacactgtaggaaatgaaataactgattttgaggtaccaaatagtgcaattgggtaaaacagggtttattcagttgcgtctgtccccagagttctactgtcaactctgggtcgtgcttttgggcccatcctttaaaacatcgcttccaaaagtgaaaatgggcgtttgatggcccgcaggccaaagctgtccaatagaaagcagtagaactttcaaacgctcgcctactggaagcgtgatttacttgacaacacgcggctcagttgtgttcctgctgtgtctacagtagaggtctagacggcaggctgcaccgtgctgtacactgcaagctctcttcagaaaggtcactgggtttctcatgcagtaagctttctaagaactcgcactggatcgtcatctcattgtacgatgcagaattgcttgtttacatggaacgagtgatcagttagggaagcagtacgagcgattgtacccagttctggtccagctgcatgcttagctttccacttcagctccagttacaagtggaagcatttctttgaggcttggctttaagagcacatttactgtatgttaacggtgtatggtgaatatattattaaataatgtggtacttgcccatcaggcataatgtctaagatctaatatacataattccattaagcggtggagggaagcaagtggaatcgtcatctggctcctgaggtttttctcttgaactaaacttttttttttggttcgaggcaagggccagaacaaatgtgacacacatggtttttgttacagtcttgtattgtatatgtgactaaattcataggcaagatgtgtctgctactaaagacccttgcagacgggaagacgtctggtagtgctacgttgggtacaaccaatggtcagttctgtcccgaagatgaaattgctggggatcatgtagacgcaaaggcagtgagaagaagacactccaccctgctgcttttcagtccttcaagtccagaacctcacctttagtcaaaagacttggcacttctgctcgaagtcctaaaaagagtcgccgctaaggtctgccaggggagctgaggaacaggcatccaagaaaaggtgccatggcaaccaggatcctcctcacagccgatcagtgtggagagagcacaactgaaggttcacaatgaatttcaggccaaattccaacgcttggggctctgtcagccttgaggttcctaaaccgagttctcagtcttgagcagtcttcagtattaaaaccactgtcccgtcacctcggtttgcattactgtcttccacggaacgtttcaataactgtactgttatttatagagcagcattaatccattaaagctaacctatttttcaatatttatggtaaactgtacatacattgtccatatgtatttgtaaataagctgtatatactgttggaattgggtcttgggttcaagtgtatatattccccctaaattttcttaactgcattttgatgaattcacattatatataggtccccggattacttgtacagaggattcaatattgacattgtgtataatactaaaattgaaaataacttgtttaaattgtatttgcaataaactggttggtcatcaacacaagttcagatatcaaactaaaagctttaaatgaggtgtctaaattttcaaaatgcagtaggtacaacacggctatctggtaacttgtcatgtgatttcaatggaagtcacgtggactccttgtatgtatatagtgtaaatgcccccgctgtactgtagaggctgacaggccactgtggcttgttggcagggagtgctatgccagtttcaatgaaacaatgtatgtttgttttaactgaactaaaataaacacttaatcctgaaaaaaaaaaaaaaa

SEQ ID NO: 27 - protein, 661 aa, Rattus norvegicus
  Brain digoxin carrier protein
MGKSEKRVATHGVRCFAKIKMFLLALTCAYVSKSLSGTYMNSMLTQIERQFGIPTSIVGLINGSFEIGNLLLIIFVSYFGTKLHRPIMIGVGCAVMGLGCFLISLPHFLMGQYEYETILPTSNVSSNSFFCVENRSQTLNPTQDPSECVKEMKSLMWIYVLVGNIIRGIGETPIMPLGISYIEDFAKSENSPLYIGILETGMTIGPLIGLLLASSCANIYVDIESVNTDDLTITPTDTRWVGAWWIGFLVCAGVNILTSFPFFFFPKTLPKEGLQENVDGTENAKEKKHRKKAKEEKRGITKDFFVFMKSLSCNPIYMLFILISVLQFNAFINSFTFMPKYLEQQYGKSTAEVVFLMGLYMLPPICLGYLIGGLIMKKFKVTVKKAAHLAFWLCLSEYLLSFLSYVMTCDNFPVAGLTTSYEGVQHQLYVENKVLADCNTRCNCSTNTWDPVCGDNGLAYMSACLAGCEKSVGTGTNMVFQNCSCIQSSGNSSAVLGLCNKGPDCANKLQYFLIIAIFGCFIYSLAGIPGYMVLLRCIKSEEKSLGVGLHAFCIRILAGIPAPIYFGALIDRTCLHWGTLKCGEPGACRMYDINSFRRLYLGLPAALRGASFVPAFFILRLTRTFQFPGDIESSKTDHAEMKLTLKESECTEVLRSKVTED

SEQ ID NO: 28 - DNA, 3622 bp, Rattus norvegicus
  Brain digoxin carrier protein
gctgctctgactttcttttagtctcagcatggagaggaccgtcttctaaagcttcttcataaaaacagcagtaagattatttaaagaatagatatctggaaacaatcagaagaacaacatgggaaaatctgagaaaagggttgcaacccatggggtcagatgttttgccaagatcaagatgtttctgttggcattaacatgtgcatatgtatccaaatcattatcaggaacttatatgaattccatgctcacacaaatagagagacaattcggtatccccacatctatagttgggcttatcaatgggagctttgaaataggaaaccttttgttgattatatttgtgagttattttggaacaaaacttcacagacctatcatgattggtgttggatgtgcagttatgggcctggggtgtttcttaatctcgctaccccatttcctcatgggccaatatgaatatgaaacgattttacctacaagcaacgtgtcctcaaacagcttcttctgtgtggaaaacagatcccagaccttaaatccaacacaagacccctcagagtgtgtgaaagaaatgaaatcattaatgtggatatatgtactggtaggaaacataatacgtggaattggtgaaactcccatcatgcccttgggtatttcctacattgaagactttgccaaatctgaaaactctcctttatacattgggattttagaaacaggaatgaccattggccctttgattggacttctgttggcttcttcctgtgcaaacatttatgtagacattgagtctgtgaatacagatgacctgaccataactcccacagatacacgctgggtcggagcttggtggatcggctttttggtctgtgcaggagtgaatatcctgaccagctttccctttttcttttttcccaaaacacttccaaaggaaggattacaggagaatgtggatggaactgaaaatgccaaagagaagaaacacagaaaaaaggccaaggaagaaaaacgaggaatcactaaagatttctttgtgttcatgaagagcctctcctgcaatccaatttacatgcttttcatccttataagtgttctccagttcaatgcatttatcaattcatttaccttcatgcctaagtatctggaacagcaatatggaaaatccactgctgaggtagtcttccttatgggtctttatatgttacctccaatatgcctcggatatttaattggtggtttgattatgaagaagttcaaggttactgtcaagaaagctgcacacttagcattctggctctgcctgtctgagtaccttctgtctttccttagctatgtgatgacctgtgataattttccagtggcaggcttaacaacctcttatgaaggggttcagcaccaactatatgtggagaacaaggtccttgctgactgtaacacaaggtgtaactgctcaacgaacacatgggatccagtgtgtggagacaatggcctggcatacatgtcagcctgccttgcaggctgtgagaagtctgttggaacaggaaccaacatggtgtttcagaattgcagctgcattcagtcatcgggaaactcatctgcagtcctgggcctgtgtaacaaaggccctgactgtgccaacaagctgcagtacttcttaatcatagcaatatttggctgtttcatatactcgctggcaggcattccagggtatatggttcttctgaggtgtatcaagtctgaagagaagtcacttggagttgggttacatgcattttgcataagaatattagctggcattcctgcacccatttactttggagctttgatagacagaacctgtttacattggggaaccctgaaatgtggtgagcccggggcatgcaggatgtatgacataaacagcttcagacgtctttaccttggattgccggctgcactaagaggagcaagctttgtccccgccttcttcattctaagacttacgaggacattccagttccctggggacattgagtcttcaaaaactgatcatgcggagatgaagctcaccttgaaggaaagtgagtgcacagaagtcctaaggtcgaaagtgacggaggactgaaaacgaagctgtaatgagttttctactgccctatgcaaggccatgaagagaatgtacacttcactagttttgaatcatgagagatacaattggaactcttaggttatccataaggccgtcaaagttacttcattcatgataaaattatttactgatagcattttcagaaggctgacatagtactcaagattttcccagggaaaacttctatagtggccttcacccttaaccttaaagctgccttcattttcaaccagcatgttctcttttaactcaatcaagggaagtggatgtttcccacacattctcaaatatctttgaaactttcctattgcagaaatatcatttagatgtttttaatttatatactgatgctggagatcaaaatatacatcttggttaagccagattgcgttagtttgttttgatttatcctctgcatgtgcaaaacttctgcatctgtcttgtgtacttaggagtggtaactctcttttacttctaagattagactcttcagagtgtgccatctcctgttttcagtcccttctatcattacttctgtcacacagttgatcatttcacatacatcactgaaaactttaatcaggttgttaaccagtcatgtagcaaagatgattgggactctttttctctaacaattcaaagctggtcatgaaactcttttttaaaaatcaagagtaggggaaaactagtcctttcaaaggctccttgtagagatgggctgtatctcagtggaatagttattacctaatgtatgtgaggccccaggttcaaccacaacgtagggtaaaccaataaagtaataaaaataacgtaagtccagatgcatcatcagatattctaaaaggctattctcatattcagggggcttcaatggcttagtgttcattctattcaagggccatggagcacatagttattaacattcataataaacttagagtaaaacctttaaagagggaccagatagaaagttcgatagaaagaactgtttgccaccgaacctgaaaaggttgttgtgatccttgggaccaacgtgaaggagagaacaaactctcacaagttgtgctatatctctttttaattgtgcatgccccattgcaaatcaattaataaaaaaagcattaaaaggtttaagaccgacatttgctgtaaaattatagctcataaacgtgaaagtacacatcaaaaataaaatcaagttgtggttgttttaatgagaaatatccctcctaggcataggcatttggatatttggtttctaatgaatgactctgcttagggaagattggatgtgcatccctaagacaaaaggtgaatcactgagatgggttgaaagttaaaagcctcacctacttccagtacactctctgctttgtgctttggttgatgatatgaaatcatggtttcctgctccagccaccatgcctggtgcttgccttcatgaacttccatccctggagtcatgcgttaaaataaactcctttttttaatgtg

SEQ ID NO: 29 - DNA, 3663 bp, Rattus norvegicus
  Synaptic vesicle transmembrane transporter (SV2)
ttgtgctctaaagcaactcaccctactgaactgggtgcagagcaaagcccttttcgcccttttccccatctggacttctctggccagttcctcttagtccgatcccaaagacactggaacacatttctaaagggtcttcttgatccctccaattcattgagcaaagggctgaaaaagaagcagagagtaaggtagagccagtgactcgcccccaagccccatcatggaagaaggctttcgagaccgagcagcgttcatccgtggggccaaagacattgccaaggaagttaagaagcacgcggccaagaaggtggtgaagggtctcgacagagtccaggatgagtattcccgaaggtcctactcccgctttgaggaggaggaggatgatgatgacttccctgcccctgctgacggctattaccgcggagaaggggcccaggatgaggaggaaggtggcgcttccagtgatgccactgagggccacgatgaggatgatgagatctacgagggagaatatcagggcatcccccgggcagagtctgggggcaaaggcgaacggatggcagatggggcacccctggctggagtgagagggggcttaagtgatggggagggtccccctgggggtcgcggggaggcgcagcggcgtaaagatcgggaagaattggctcagcagtatgagaccatcctccgggagtgcggccatggtcgcttccagtggacactctacttcgtgctgggtctggcgctgatggccgatggtgtagaggtctttgtggtgggctttgtgctgcccagtgctgagaaagatatgtgcctgtcggactccaacaaaggcatgctaggcctcattgtgtacctgggcatgatggtgggggccttcctctggggaggcctggctgatcggctgggtcggagacagtgtctgctcatctcgctctcagtcaacagcgtcttcgctttcttctcatccttcgtccagggttatggcaccttccttttctgccgcctcctttctggggttgggattggtggttccatccccattgtcttctcctatttttcggagtttctggcccaggagaaacgtggggagcatttgagctggctctgtatgttctggatgattggtggcgtgtatgcagctgcaatggcctgggccatcatcccccactatgggtggagtttccagatgggctctgcttaccagttccacagctggagggtctttgtcctcgtctgtgcctttccctctgtgtttgccatcggggctctgactacgcagccggagagtccccgcttcttcttagagaatgggaagcacgatgaggcctggatggtgctgaagcaggttcatgacaccaacatgcgagccaagggccatcctgagcgagtcttctcagtaacccacattaaaacgattcatcaggaggatgaattgattgagatccagtcagacacaggaacctggtaccagcgctggggagtgcgggctttgagcctggggggtcaggtttgggggaacttcctctcctgcttcagtccagagtaccggcgcatcactctgatgatgatgggggtatggttcaccatgtccttcagctactacggtttgactgtctggtttcccgacatgatccgccatctccaggctgtggactatgcagcccgaaccaaagtgttcccaggggagcgcgtggagcacgtgacatttaacttcacactggagaatcagatccaccgagggggacagtacttcaatgacaagttcatcgggctgcgtctgaagtcagtgtcctttgaggattccctgtttgaggaatgttactttgaagatgtcacatccagcaacacattcttccgcaactgcacattcatcaacaccgtgttctacaacacggacctgtttgagtacaagttcgtgaacagccgcctggtgaacagcacattcctgcacaataaggaaggttgcccactagatgtgacagggacgggcgaaggtgcctacatggtgtactttgtcagcttcttggggacactggctgtgctccctggaaatattgtgtctgctctgctcatggacaagattggcaggctcagaatgcttgctggttccagtgtgttgtcctgtgtttcctgcttcttcctgtcttttgggaacagtgagtcagccatgatcgctctgctctgcctttttgggggagtcagtattgcatcctggaacgcgctggacgtgctgactgttgaactctacccttccgacaagaggacgacggccttcggcttcctgaatgccctgtgtaagctggcagctgtactgggcatcagcatcttcacgtcctttgtgggaatcaccaaggccgctcccatcctcttcgcctcagctgcgcttgcccttggtagctctctggctctgaagctgcctgagacccggggacaggtgctgcagtgagggatgggggagtgtctcaggggctttagggatggcaggcacactgtgaccaataatttcttttatccctaccctgccctgctgtcctggtcctactccgtgtttggtgtcttagctgtgtgcctgtgtgcatgtgtgtgaccctgacgggcaggggctacggggagggtccctttgtcccatgtttgggaggagggactccccacctgctgccaccctcaactttgcacaaggagaaggctgagctgcatccttctctccctcagtgttagcaggggtggggacgactgtttctctgctccaggtgttccagaatttctgcctttcccatcattccctccgcctaggccctggtgaaccacaggtatggagttatagtgggggctgaggcttggaccaaaagaacttcttgagtgggagcctcccaaggatgctggggagtagcaataaaccttagcctccgttttcacctcaattcaggctacaagtgtgaagcctggattttatggaattagttttctgattcttatttatatgtaagttctgaggcagcttagctggactgtgtgtggatgtatacatacactcatatgtgtgtgtgtgtgcgcgcgtgcgtgtgcgtgtgtgtatgtgtgccatggggtaggggtaccactatactgttcaattataagccaagagtagtagtttcagtgagcacacacacaacactgtttttctatcgtaactcccagaatcttgtacctgtgttggggctgcaggcagaagtccttggtcaggctggggtgagccctgcaatcttgggggacctgagggcacctgacaaggactttctccttcctctagagaggtcctacccactagccacagccctcccatctgacctgtccacacaggcagtgtatcagaggaaagaaagggaaaataaccaggcacacatggtcaaaccagcaggtctgaaagcacaagaagctggggcaggggcaggaagcaggggtccatcccctaacccttctcaaaaaggctgggtcgtgagggacccctaatgcagggacctgaagcctcagtttccccatcttgcccttccacagaacagcctctgtaggtagagctgccccccgtcctaccctactcttgtggctgctttctttggtactcttcccactcccaccgtagctgtgacgtgttgtagtttttagctgtttctttag

SEQ ID NO: 30 - protein, 633 aa, Rattus norvegicus
  Glycine transporter
MVGKGAKGMLNGAVPSEATKKDQNLTRGNWGNQIEFVLTSVGYAVGLGNVWRFPYLCYRNGGGAFMFPYFIMLVFCGIPLFFMELSFGQFASQGCLGVWRISPMFKGVGYGMMVVSTYIGIYYNVVICIAFYYFFSSMTHVLPWAYCNNPWNTPDCAGVLDASNLTNGSRPTALSGNLSHLFNYTLQRTSPSEEYWRLYVLKLSDDIGDFGEVRLPLLGCLGVSWVVVFLCLIRGVKSSGKVVYFTATFPYVVLTILFVRGVTLEGAFTGIMYYLTPKWDKILEAKVWGDAASQIFYSLGCAWGGLITMASYNKFHNNCYRDSVIISITNCATSVYAGFVIFSILGFMANHLGVDVSRVADHGPGLAFVAYPEALTLLPISPLWSLLFFFMLILLGLGTQFCLLETLVTAIVDEVGNEWILQKKTYVTLGVAVAGFLLGIPLTSQAGIYWLLLMDNYAASFSLVVISCIMCVSIMYIYGHRNYFQDIQMMLGFPPPLFFQICWRFVSPTIIFFILIFTVIQYRPITYNHYQYPGWAVAIGFLMALSSVICIPLYALFQLCRTDGDTLLQRLKNATKPSRDWGPALLEHRTGRYAPTTTPSPEDGFEVQPLHPDKAQIPIVGSNGSSRLQDSRI

SEQ ID NO: 31 - DNA, 2558 bp, Rattus norvegicus
  Glycine transporter
ctcttgaggcctcttgtctgagaggcactgaacgcaggagtctgcaggtgtggtccagatctccagatcccccaacccactgccaccatggtaggaaaaggtgccaaagggatgctgaatggtgctgtgcccagcgaggccaccaagaaggaccagaacctcacacggggcaactggggcaaccagatcgagtttgtactgacgagcgtgggctatgccgtgggcctgggcaatgtgtggcgtttcccatacctctgctatcgcaacgggggaggcgccttcatgtttccctacttcatcatgctggtcttctgcggcattcctctcttcttcatggagctctccttcggccagtttgcaagccagggctgcctgggggtctggaggatcagccccatgttcaaaggcgtgggctatggtatgatggtggtgtccacgtacatcggtatctactacaacgtggtcatctgcatcgccttctactacttcttctcgtccatgacgcatgtgctgccctgggcttactgcaataatccctggaacacacctgactgtgccggtgtgctggatgcttccaatctcaccaatggctcccggcccactgccctgtctggcaacctgtctcacctgttcaactacaccttgcaaaggaccagccccagtgaggagtactggaggctgtatgtgctgaagctgtcggatgacattggagattttggagaagtgcggcttcctctcctaggctgccttggcgtctcctgggtggttgtcttcctctgcctcattcgaggagtcaagtcttcagggaaagtggtgtacttcacggccacatttccctatgtggtgctgaccattctgtttgttcgtggagtgaccctggaaggagccttcacgggtatcatgtactacctgaccccaaagtgggacaagatcctggaggccaaggtgtggggggatgcagcctctcagatcttctattccctgggctgtgcatggggtggcctcatcaccatggcatcctacaacaaattccacaacaactgctaccgggacagcgtcatcatcagcatcaccaattgtgctaccagtgtctatgctggcttcgtcatcttctctatcctaggcttcatggccaatcacctgggtgtggatgtgtctcgggtggcagaccacgggcccgggctagctttcgtggcttaccccgaggctctcacactgcttcccatctccccgctctggtccttgctgtttttcttcatgctcatcctgctgggactcggtactcagttctgcctcctggagaccctagtcactgccattgtggatgaggtggggaatgagtggattctgcagaagaagacctacgtgaccttgggtgtggctgtggctggcttcttgctgggtatccctcttaccagccaggcgggcatctactggctgctgttgatggacaactacgcagccagcttctccttggttgtcatctcctgcatcatgtgcgtgtccatcatgtatatctatgggcaccggaactacttccaggacattcagatgatgctggggttcccaccgcctctcttcttccagatctgttggcgttttgtctctcccactatcatctttttcattctcatcttcacggtgatccagtaccggccaatcacttacaaccactaccagtacccaggctgggctgtggccatcggcttcctcatggctttgtcgtctgtcatctgcatcccattgtacgcattgttccagctctgccgcacagatggggacacacttcttcagcgtttgaaaaatgccacaaagccaagcagagactggggccctgccctcctggagcaccggactgggcgctatgcccccactacaaccccctctcctgaagatgggtttgaggttcagccactgcacccggacaaggcccagatccccatcgtgggcagtaacggctccagccgcctccaggactcccggatatgagcacagttgttgcaaggggagaagccccacccaacccttgctcctaccacagagactgaggaggtggtggaccggtgtgactgcctgccccatcatgccctggccagggtggctgctgtcaccttggccaccactgctcatgtccccagtgtttacacatcctttggatgccaagacagcagctgggggtggaaaagtgatgggggtgggggggaggtgcgtgggggtggggcatggggcggcagtgtccaaagcactttggaggaggtctcaggccatgtccccagaggcttccaggcttcattatccctcatgctctgccctgagctgtttcactacgggataagaggttttgtttccacaccccacctgttcccctccagcctcatgaccagtgttcctgaccccagaacagaccctagcctcttgcccaggcaaatctgtatcttcctgctccggacaaggtgaggcgcccgggggctgtacagtgttacttgttggactgcaccactcagccctgtttatttgtgtaattatttttttaaaaaattgtattacctgtggttgcc

SEQ ID NO: 32 - protein, 140 aa, Homo sapiens [sequence omitted]

SEQ ID NO: 33 - DNA, 2319 bp, Homo sapiens
  SEDL
cagaaacttaagatttgtcagcttttttgcttcactaatactttcttctttcctagttttcaatgaatccattttatgaacccaattctcctattcgatcaagtgcatttgacagaaaagttcagtttcttgggaagaaacaccttttaagctgaatgcagaaaattccaaaataaatgatgtcaccacaatggtgtatactcaggaatgtgtacattgtaagttacttgattaaatagcctggaaaacttttgtgtattctcagcttatctaaacctaatgaaattccttttatatttaaaaatagtacattctgtctcatgtcacgtatcaatagatcaattggtatttccttgtgaacagtgttatttataaagagttcattatcaataatcatgttttttttttttttttttttctgatacagagtctcactctgttgccaggctggagtgcagtggcgcaatcttggctcactgcaacctccgcctcccaggttcaggcgattctcctgcctcagcctccaagtagctgggactacaggcgcgtgccaccacgcccggctaatttttgtatttttagtagagacagggtttcaccatattggtcaggctggtcttgaactcctgacctcgtgatctgcccgccttggcctcccaaagtactgggattacaggcgtgagccaccgtgcccaaccatgaaatatttttacttaaaaattgggaataagctcgctttttttttttttgagatggagtcttgctcctgttgtgcaggctgtagtgcagtggcacgatcttggctcactgcaacctccacctcccgggttcaagcaattctccttcttcagcctcccgagtagctgagattataggcgtgcaccaccacacctggctaatttttgtatttttagtagagacagggtttcaccatattggtcaggctggtcttgaactcctgacctcgtgatccacccacctcaggaagtgctgggattacaggcgtgtgagccaccacgcccggccatgaaatatttttacttaaaaattgggaataagctttttggttttttgtgggtttttgtttttgttttttgttttttgtttttttgagatggagtcttgctcctgttgtgcaggctggagtgcagtggcacagtcttggctcactgcaacctccacctcctgggttcaagcaattctccttcttcagcctcccgagtagctgggattacaggcatgcaccaccacacctggctaatttttgtgtttttagtagagacggggtttcgctattttggccgggctggtttcaaactcctgacctcagttgatccacccgcctcagcctcccaaagtgctaggattacaggcatgaaccaccgtgcccggccaggaataagcttttgacttacccaattcagataggttgatctttggggttttttttttttttttgagatggagtttcgctctgttgtccaggctggagtgcaatggcagttgtttcaccgtaacctctgcctcctgacttcaagcaattctcctgcctcagcctcccaaagtgctgggattacaggtgtgagccaccgtgcccggcccagataggttgatcttaatgtaacaacccaaaaataaatgtcatagtcaagatttggtagataaatttaaaattaaaatattctgcagttgggagtgaaatgtgatagcacatacgttgacattatgcatttagagatgttataaaaatgtataggcagtatacacagcactactcaagaagccaaagaaacacttgtgcagtgctaagtgtcacatgtctgcttccaccagaggctaggaatagtgatcctgctataatgtgagaacccaaatcatgtttataaaataggacgctgggagcagttgcaggccacagtgaagtgtgttgcttctgtcactttatattcttatatttcctttccctcagacagtaaactgttgatactcgtacttgtaaaaaattgtaaggcaatttttagtattgttgtcaaagaaaagcttggattacattaacatttgtattcagtcttttaggtgatacaccagagggggctgggaattgtctctttgttcctataagtagatcttaatgtaaaatagtaaatgtccattgaaaagcaagtaatacagcctgtgctaattgggagcacttgaacaattttgttccattctgagtaacttttgagcaagtaattctaagctttgtcttgtatccttgtgtgaaattgcataatttttaccctatttgatttcttaaataaagatgtttgctcaaga

SEQ ID NO: 34 - protein, 587 aa, Rattus norvegicus
  Erythroid-specific delta-aminolevulinate synthase
MVAAAMLLRSCPVLSKGPTGLLGKVAKTYQFLFGIGRCPILATQGPTCSQIHLKATKAGADSPSWTKSHCPFMLSELQDRKSKIVQRAAPEVQEDVKTFKTDLLSFMESTTRSQSVPRFQDPEQTGGAPPLLIQNNMTGSQAFGYDQFFRDKIMEKKQDHTYRVFKTVNRWANAYPFAQHFSEASMDSKDVSVWCSNDYLGISRHPRVLQAIEETLKNHGAGAGGTRNISGTSKFHVELEQELAELHHKDSALLFSSCFVANDSTLFTLAKLLPGCEIYSDAGNHASMIQGIRNSGAVKFVFRHNDPGHLKKLLEKSDPKTPKIVAFETVHSMDGAICPLEELCDVAHQYGALTFVDEVHAVGLYGTRGAGIGERDGIMHKLDIISGTLGKAFGCVGGYIASTRDLVDMVRSYAAGFIFTTSLPPMVLSGALESVRLLKGEEGQALRRAHQRNVKHMRQLLMDRGFPVIPCPSHIIPIRVGNAALNSKICDLLLAKHSIYVQAINYPTVPRGEELLRLAPSPHHSPQMMENFVEKLLLAWTEVGLPLQDVSVAACNFCRRPVHFELMSEWERSYFGNMGPQYVTTYA

SEQ ID NO: 35 - DNA, 1899 bp, Rattus norvegicus
  Erythroid-specific delta-aminolevulinate synthase
gactttgggctcaggatggtggcagcagctatgttgctacggtcctgtccagtgctctctaagggccccacaggcctcctaggcaaagtggctaaaacttaccagttcctatttggtattggacgctgccccatcctggccactcaaggaccaacctgttctcaaatccatcttaaggcaaccaaggctggagcagactctccgtcttggactaagagccattgtcctttcatgctgtcagaactccaagacaggaagagcaagattgtgcagagggcagctccagaagtccaagaggatgtcaagactttcaagacagacctgctgagcttcatggagtcaactacccgaagccaatcagtgcctcgtttccaggatccagagcagactggaggggcacctcccctgctgattcagaataatatgactggaagccaggcttttggttatgaccaattttttagagacaagatcatggaaaagaagcaggaccacacataccgtgtgttcaagactgtgaatcgctgggctaatgcctacccctttgcccaacacttctccgaggcatctatggactcaaaggatgtttctgtctggtgcagtaatgactatttgggcataagcaggcaccctcgtgtcttgcaggccatagaggagaccctgaagaatcatggagctggagctgggggcactcgcaatatctcaggtacaagcaagtttcatgtggagcttgaacaggagctggctgaactacatcataaggactcggctctgctcttctcctcctgttttgtggccaatgattctactctctttacactggccaagcttctgccagggtgtgagatctactcagacgcaggcaatcatgcctccatgatccaaggcattcgtaacagtggtgcagtcaagtttgtcttcagacacaatgacccaggccacctgaagaaacttcttgagaagtccgatcccaagacaccaaaaattgtggcttttgagactgttcactccatggatggtgccatctgtcctctggaggaattgtgtgatgtggcccaccagtacggggccctgaccttcgtggatgaagtccatgccgtaggactatatggaacccggggtgcagggatcggggagcgtgatggaattatgcacaagcttgacatcatctctggaactcttggcaaggcctttggctgtgtcggtggctatatcgccagcactcgggacttggtggacatggtgcgctcctacgctgcaggcttcatctttaccacttcactgcctcccatggtgctctctggagctctagagtctgtgcgtctactcaagggagaggagggtcaagccctgaggcgtgcacaccagcgcaacgtcaaacatatgcgccagctactaatggacaggggctttcctgttatcccctgtcccagccacatcatccccataagggtgggtaatgcggcactcaacagcaagatctgtgatcttctgctcgccaagcacagcatctatgtgcaggccatcaactacccaactgtgcctcgtggtgaggagctgctgcgcttggccccctccccccaccacagccctcagatgatggaaaactttgtggagaagttgctgctggcctggactgaggtggggttgcccctccaagatgtgtctgtggctgcatgcaacttctgccgtcgtcctgtgcactttgagcttatgagcgagtgggagcgatcctactttgggaacatgggaccccaatatgttactacctatgcctaaggagccagctgccttagatgccaaccccacctgcactccccctggggatggtcttcctcctactctctgctttgctgtgtgcttctagctgacttgattctaaaaataaagagcaacctg

SEQ ID NO: 36 - protein, 559 aa, Rattus norvegicus
  Polypeptide Ga1Nac transferase
MRKFAYCKVVLATSLVWVLLDMFLLLYFSECNKCEEKKERGLPAGDVLELVQKPHEGPGEMGKPVVIPKEDQEKMKEMFKINQFNLMASEMIAFNRSLPDVRLEGCKTKVYPDSLPTTSVVIVFHNEAWSTLLRTVHSVINRSPRHMIEEIVLVDDASERDFLKRPLESYVKKLKVPVHVIRMEQRSGLIRARLKGAAVSKGQVITFLDAHCECTVGWLEPLLARIKHDRRTVVCPIIDVISDDTFEYMAGSDMTYGGFNWKLNFRWYPVPQREMDRRKGDRTLPVRTPTMAGGLFSIDRDYFQEIGTYDAGMDIWGGENLEISFRIWQCGGTLEIVTCSHVGHVFRKATPYTFPGGTGQIINKNNRRLAEVWMDEFKNFFYIISPGVTKVDYGDISSRVGLRHKLQCKPFSWYLENIYPDSQIPRHYFSLGEIRNVETNQCLDNMARKENEKVGIFNCHGMGGNQVFSYTANKEIRTDDLCLDVSKLNGPVTMLKCHHLKGNQLWEYDPVKLTLQHVNSNQCLDKATEEDSQVPSIRDCTGSRSQQWLLRNVTLPEIF

SEQ ID NO: 37 - DNA, 1838 bp, Rattus norvegicus
  Polypeptide Ga1Nac transferase
atatgactgtgatttctgatgaaaccagattggaataattttcatsatatttgtatatttatatatatatattttaaaattttacatttgacttaaagtgccatgagaaaatttgcatattgcaaggtggttctagccacctccttggtttgggtactcttggatatgttcctgctgctttacttcagtgaatgcaacaaatgtgaagagaagaaggagcgagggcttcctgctggggatgttctagagctggtgcagaagcctcacgaaggtcctggagaaatgggaaaaccagtcgtcattcctaaagaggatcaggaaaagatgaaagagatgttcaaaatcaaccagttcaacctaatggcgagtgagatgattgcattcaacagatccttaccagacgtgaggctagaggggtgtaaaacaaaagtgtacccagatagccttcctacgacaagcgtggtgattgtctttcacaatgaggcgtggagcaccctcctgcgaacagtccacagtgtcattaaccgctcaccaagacacatgatagaagagattgttcttgtagacgatgccagcgaaagagactttttgaaaagacctctagagagttatgtgaaaaagcttaaagtgccagttcatgtaattcgaatggaacaacgttctgggttgatcagagctagattaaaaggagctgctgtgtccaaaggccaagtgatcaccttcttagatgctcactgcgagtgcacagtagggtggctggagcctctgttagcccggatcaaacatgacaggaggacagtggtgtgtcctatcatcgatgtgatcagtgatgacacttttgagtacatggcgggctctgatatgacctatggtggattcaactggaagctcaatttccgttggtatcctgttccccaacgagaaatggacagaaggaaaggtgaccggactcttcctgtcagaacacctacaatggctggaggcctgttttcaatagacagagattactttcaggaaattggaacatatgatgctggaatggatatttggggaggagaaaacctagaaatttcctttaggatttggcagtgtggagggactctggaaatagtgacgtgctcccacgttggccatgtgtttcggaaagctacgccgtacacgttcccgggtggcacggggcagatcatcaacaagaataacagacggctcgcggaggtgtggatggatgaattcaagaatttcttctacataatttctccaggtgttacaaaggtagattatggtgatatatcatcaagagtcggtctgagacataaactacagtgcaagcctttctcttggtacctagaaaatatttatcccgattctcaaattcctcgtcactatttctcattgggagagatacgaaatgtggaaacaaatcaatgtctagataacatggctagaaaagagaatgaaaaggttggaatttttaattgtcatggtatgggaggcaatcaggttttctcttacactgccaacaaagaaattagaacagatgacctttgtttggacgtttccaaacttaatggcccagttaccatgctcaaatgccaccacctaaaaggcaaccagctctgggagtatgacccagtgaaattaaccctgcagcatgtgaacagtaaccagtgcctggataaagccacagaagaggacagccaggtgcccagcatcagagactgcactggaagccggtcccagcagtggcttcttcgaaatgtcacccttccagaaatattctgagaccaaattacaacaaagaaaggattgactgggctacctcagcataagccgaattc

SEQ ID NO: 38 - protein, 559 aa, Mus musculus
  PARP-2
MAPRRQRSGSGRRVLNEAKKVDNGNKATEDDSPPGKKMRTCQRKGPMAGGKDADRTKDNRDSVKTLLLKGKAPVDPECAAKLGKAHVYCEGDDVYDVMLNQTNLQFNNNKYYLIQLLEDDAQRNFSVWMRWGRVGKTGQHSLVTCSGDLNKAKEIFQKKFLDKTKNNWEDRENFEKVPGKYDMLQMDYAASTQDESKTKEEETLKPESQLDLRVQELLKLICNVQTMEEMMIEMKYDTKRAPLGKLTVAQIKAGYQSLKKIEDCIRAGQHGRALVEACNEFYTRIPHDFGLSIPPVIRTEKELSDKVKLLEALGDIEIALKLVKSERQGLEHPLDQHYRNLHCALRPLDHESNEFKVISQYLQSTHAPTHKDYTMTLLDVFEVEKEGEKEAFREDLPNRMLLWHGSRLSNWVGILSHGLRVAPPEAPITGYMFGKGIYFADMSSKSANYCFASRLKNTGLLLLSEVALGQCNELLEANPKAQGLLRGKHSTKGMGKMAPSPAHFITLNGSTVPLGPASDTGILNPEGYTLNYNEFIVYSPNQVRMRYLLKIQFNFLQLW

SEQ ID NO: 39 - DNA, 1707 bp, Mus musculus
  PARP-2
ctcgagtcaagagcgatggcgccgcggcggcagagatcaggctctggaaggcgagtgctaaatgaagccaagaaagttgataatggcaacaaagcaacagaagacgactctcctcctggcaagaagatgcgcacgtgccagagaaaagggcctatggctggagggaaggacgcagacaggacaaaagacaatcgagactctgtgaagaccttgctgttaaagggcaaagcccctgtggacccagagtgtgcagccaagctgggaaaggctcatgtgtattgtgaaggagatgatgtctatgatgtcatgctaaatcaaaccaatctccagttcaacaacaacaagtactaccttattcagctgttagaagatgatgcccagaggaacttcagtgtttggatgaggtggggccgagttggaaagacggggcagcacagcttggtgacttgttctggtgacctcaacaaagcaaaagaaatatttcagaaaaaattccttgacaaaactaaaaacaattgggaggaccgtgagaactttgaaaaagtacctggaaaatacgacatgttacagatggactatgctgccagcacgcaggatgaaagtaaaacaaaagaagaggaaactttgaagcctgagtctcagctggatcttcgagtccaggagctgctaaagttgatctgtaacgtgcagaccatggaagaaatgatgattgagatgaagtatgacaccaagagagccccgcttggaaagctgacagtggcgcaaatcaaggccggttaccagtctctcaagaagattgaggactgcatccgcgctggccagcatgggcgagcgcttgttgaagcgtgcaatgaattctacaccaggatccctcatgactttggactctccatccctccagtaatccggacagagaaggaactgtcagacaaagtaaaactgctagaggcattgggagacattgaaattgcccttaaactggtgaagtcagagcgccaaggcctagaacacccactggaccaacactatagaaacctacactgtgctttgcgtcctctggaccatgaaagtaatgagtttaaggtgatttctcagtacctacagtctacgcatgctcctacacacaaggactatactatgaccttgctggatgttttcgaagtagagaaggaaggggagaaagaggccttcagggaggaccttcctaacaggatgctgctctggcatggatccaggctgagtaactgggtggggatcctgagccacgggcttagagttgccccacctgaggctcccatcacaggttatatgtttggaaaaggaatctactttgctgacatgtcctccaagagtgccaattactgctttgcctctcgcctaaagaatacaggattgcttcttctgtcagaggtagctctaggtcagtgtaatgaactactggaggccaatcctaaagcacaaggattgcttcggggcaagcatagcaccaaggggatgggaaagatggctcccagccctgcccacttcatcaccctgaatgggagtacagtgcccttaggaccagcaagtgacacaggaattctcaatccagaggggtacaccctcaactacaatgagtttattgtttatagccccaaccaggtccgtatgcgataccttctaaagattcaatttaacttcctgcagctatggtgaatgttgctcgag

SEQ ID NO: 40 - protein, 188 aa, Homo sapiens
  K-ras
MTEYKLVVVGACGVGKSALTIQLIQNHFVDEYDPTIEDSYRKQVVIDGETCLLDILDTAGQEEYSAMRDQYMRTGEGFLCVFAINNTKSFEDIHHYREQIKRVKDSEDVPMVLVGNKCDLPSRTVDTKQAQDLARSYGIPFIETSAKTRQGVDDAFYTLVREIRKHKEKMSKDGKKKKKKSKTKCVIM

SEQ ID NO: 41 - DNA, 5775 bp, Homo sapiens
  K-ras
tcctaggcggcggccgcggcggcggaggcagcagcggcggcggcagtggcggcggcgaaggtggcggcggctcggccagtactcccggcccccgccatttcggactgggagcgagcgcggcgcaggcactgaaggcggcggcggggccagaggctcagcggctcccaggtgcgggagagaggcctgctgaaaatgactgaatataaacttgtggtagttggagcttgtggcgtaggcaagagtgccttgacgatacagctaattcagaatcattttgtggacgaatatgatccaacaatagaggattcctacaggaagcaagtagtaattgatggagaaacctgtctcttggatattctcgacacagcaggtcaagaggagtacagtgcaatgagggaccagtacatgaggactggggagggctttctttgtgtatttgccataaataatactaaatcatttgaagatattcaccattatagagaacaaattaaaagagttaaggactctgaagatgtacctatggtcctagtaggaaataaatgtgatttgccttctagaacagtagacacaaaacaggctcaggacttagcaagaagttatggaattccttttattgaaacatcagcaaagacaagacagggtgttgatgatgccttctatacattagttcgagaaattcgaaaacataaagaaaagatgagcaaagatggtaaaaagaagaaaaagaagtcaaagacaaagtgtgtaattatgtaaatacaatttgtacttttttcttaaggcatactagtacaagtggtaatttttgtacattacactaaattattagcatttgttttagcattacctaatttttttcctgctccatgcagactgttagcttttaccttaaatgcttattttaaaatgacagtggaagtttttttttcctcgaagtgccagtattcccagagttttggtttttgaactagcaatgcctgtgaaaaagaaactgaatacctaagatttctgtcttggggtttttggtgcatgcagttgattacttcttatttttcttaccaagtgtgaatgttggtgtgaaacaaattaatgaagcttttgaatcatccctattctgtgttttatctagtcacataaatggattaattactaatttcagttgagaccttctaattggtttttactgaaacattgagggacacaaatttatgggcttcctgatgatgattcttctaggcatcatgtcctatagtttgtcatccctgatgaatgtaaagttacactgttcacaaaggttttgtctcctttccactgctattagtcatggtcactctccccaaaatattatattttttctataaaaagaaaaaaatggaaaaaaattacaaggcaatggaaactattataaggccatttccttttcacattagataaattactataaagactcctaatagctttttcctgttaaggcagacccagtatgaatgggattattatagcaaccattttggggctatatttacatgctactaaatttttataataattgaaaagattttaacaagtataaaaaaattctcataggaattaaatgtagtctccctgtgtcagactgctctttcatagtataactttaaatcttttcttcaacttgagtctttgaagatagttttaattctgcttgtgacattaaaagattatttgggccagttatagcttattaggtgttgaagagaccaaggttgcaagccaggccctgtgtgaaccttgagctttcatagagagtttcacagcatggactgtgtgccccacggtcatccgagtggttgtacgatgcattggttagtcaaaaatggggagggactagggcagtttggatagctcaacaagatacaatctcactctgtggtggtcctgctgacaaatcaagagcattgcttttgtttcttaagaaaacaaactcttttttaaaaattacttttaaatattaactcaaaagttgagattttggggtggtggtgtgccaagacattaattttttttttaaacaatgaagtgaaaaagttttacaatctctaggtttggctagttctcttaacactggttaaattaacattgcataaacacttttcaagtctgatccatatttaataatgctttaaaataaaaataaaaacaatccttttgataaatttaaaatgttacttattttaaaataaatgaagtgagatggcatggtgaggtgaaagtatcactggactaggttgttggtgacttaggttctagataggtgtcttttaggactctgattttgaggacatcacttactatccatttcttcatgttaaaagaagtcatctcaaactcttagttttttttttttacactatgtgatttatattccatttacataaggatacacttatttgtcaagctcagcacaatctgtaaatttttaacctatgttacaccatcttcagtgccagtcttgggcaaaattgtgcaagaggtgaagtttatatttgaatatccattctcgttttaggactcttcttccatattagtgtcatcttgcctccctaccttccacatgccccatgacttgatgcagttttaatacttgtaattcccctaaccataagatttactgctgctgtggatatctccatgaagttttcccactgagtcacatcagaaatgccctacatcttattttcctcagggctcaagagaatctgacagataccataaagggatttgacctaatcactaattttcaggtggtggctgatgctttgaacatctctttgctgcccaatccattagcgacagtaggatttttcaaccctggtatgaatagacagaaccctatccagtggaaggagaatttaataaagatagtgcagaaagaattccttaggtaatctataactaggactactcctggtaacagtaatacattccattgttttagtaaccagaaatcttcatgcaatgaaaaatactttaattcatgaagcttacttttttttttttggtgtcagagtctcgctcttgtcacccaggctggaatgcagtggcgccatctcagctcactgcaaccttccatcttcccaggttcaagcgattctcgtgcctcggcctcctgagtagctgggattacaggcgtgtgcactacactcaactaatttttgtatttttaggagagacggggtttcacctgttggccaggctggtctcgaactcctgacctcaagtgattcacccaccttggcctcataaacctgttttgcagaactcatttattcagcaaatatttattgagtgcctaccagatgccagtcaccgcacaaggcactgggtatatggtatccccaaacaagagacataatcccggtccttaggtactgctagtgtggtctgtaatatcttactaaggcctttggtatacgacccagagataacacgatgcgtattttagttttgcaaagaaggggtttggtctctgtgccagctctataattgttttgctacgattccactgaaactcttcgatcaagctactttatgtaaatcacttcattgttttaaaggaataaacttgattatattgtttttttatttggcataactgtgattcttttaggacaattactgtacacattaaggtgtatgtcagatattcatattgacccaaatgtgtaatattccagttttctctgcataagtaattaaaatatacttaaaaattaatagttttatctgggtacaaataaacagtgcctgaactagttcacagacaagggaaacttctatgtaaaaatcactatgatttctgaattgctatgtgaaactacagatctttggaacactgtttaggtagggtgttaagacttgacacagtacctcgtttctacacagagaaagaaatggccatacttcaggaactgcagtgcttatgaggggatatttaggcctcttgaatttttgatgtagatgggcatttttttaaggtagtggttaattacctttatgtgaactttgaatggtttaacaaaagatttgtttttgtagagattttaaagggggagaattctagaaataaatgttacctaattattacagccttaaagacaaaaatccttgttgaagtttttttaaaaaaagactaaattacatagacttaggcattaacatgtttgtggaagaatatagcagacgtatattgtatcatttgagtgaatgttcccaagtaggcattctaggctctatttaactgagtcacactgcataggaatttagaacctaacttttataggttatcaaaactgttgtcaccattgcacaattttgtcctaatatatacatagaaactttgtggggcatgttaagttacagtttgcacaagttcatctcatttgtattccattgatttttttttttcttctaaacattttttcttcaaaacagtatatataactttttttaggggattttttttagacagcaaaaaactatctgaagatttccatttgtcaaaaagtaatgatttcttgataattgtgtagtgaatgttttttagaacccagcagttaccttgaaagctgaatttatatttagtaacttctgtgttaatactggatagcatgaattctgcattgagaaactgaatagctgtcataaaatgctttctttcctaaagaaagatactcacatgagttcttgaagaatagtcataactagattaagatctgtgttttagtttaatagtttgaagtgcctgtttgggataatgataggtaatttagatgaatttaggggaaaaaaaagttatctgcagttatgttgagggcccatctctccccccacacccccacagagctaactgggttacagtgttttatccgaaagtttccaattccactgtcttgtgttttcatgttgaaaatacttttgcatttttcctttgagtgccaatttcttactagtactatttcttaatgtaacatgtttacctggcctgtcttttaactatttttgtatagtgtaaactgaaacatgcacattttgtacattgtgctttcttttgtgggtcatatgcagtgtgatccagttgttttccatcatttggttgcgctgacctaggaatgttggtcatatcaaacattaaaaatgaccactcttttaatgaaattaacttttaaatgtttataggagtatgtgctgtgaagtgatctaaaatttgtaatatttttgtcatgaactgtactactcctaattattgtaatgtaataaaaatagttacagtgactatgagtgtgtatttattcatgcaaatttgaactgtttgccccgaaatggatatggatactttataagccatagacactatagtataccagtgaatcttttatgcagcttgttagaagtatccttttattttctaaaaggtgctgtggatattatgtaaaggcgtgtttgcttaaacaattttccatatttagaagtagatgcaaaacaaatctgcctttatgacaaaaaaataggataacattatttatttatttccttttatcaataaggtaattgatacacaacaggtgacttggttttaggcccaaaggtagcagcagcaacattaataatggaaataattgaatagttagttatgtatgttaatgccagtcaccagcaggctatttcaaggtcagaagtaatgactccatacatattatttatttctataactacatttaaatcattaccagg

SEQ ID NO: 42 - protein, 179 aa, Homo sapiens
  ARF-like protein
MGILFTRIWRLFNHQEHKVIIVGLDNAGKTTILYQFSMNEVVHTSPTIGSNVEEIVVNNTRFLMWDIGGQESLRSSWNTYYTNTEFVIVVVDSTDRERISVTREELYKMLAHEDLRKAGLLIFANKQDVKECMTVAEISQFLKLTSIKDHQWHIQACCALTGEGLCQGLEWMMSRLKIR

SEQ ID NO: 43 - DNA, 2717 bp, Homo sapiens
  ARF-like protein
agcctgagcccgggcggctggagggctccgctgcccgaggatgggaattctcttcacccggatctggagactgttcaatcaccaggagcacaaagttattattgttgggctggacaatgccgggaagactaccatcctttaccagttttccatgaatgaagttgtacatacatctcctacaataggaagcaatgtggaagagattgtggttaataatacacgtttcctgatgtgggatattggtggccaagaatcccttcgttcttcctggaacacttattatactaacacagagtttgtaatagttgtggtggacagcacagacagagaaagaatttctgtaactagagaagagctctacaaaatgctagcccacgaggacctaaggaaagctgggttgctgatttttgctaataaacaagatgttaaagaatgcatgacagtagcagaaatctcccagtttttgaagctcacttctataaaagaccaccaatggcatatccaagcatgctgtgctctcactggcgaggggttatgccaaggacttgaatggatgatgtcacggctgaagatcagatgatctcttctgaccccttctcatggactctgtataaacaaagtgctggactttatctgaaagctgcaaaaaatggtttagatatatttataataaactgacttaagagttttctacaagaagaaaattaagaccatttatttgaaaacagatgaaatgtcaccacctcgtttgctctctcattccttccaaacctgtgactggtattttctcatgatgaatcctctccggacatgggagagttctaatgaatacaagggagaggaagacatttgaacttggagctttatttcctcgacgagcccaccctgccccaagtgaatgttcccttttcattacattgaatcaaatacggatcagcacggatactgtttccagtttttaaaaatgtaataatattatggaaagtattttacttaaagttgaatatgtattgtgtatatacctcaagttcaggttaatggctttgatttatttgtgttctaaaggaaagcaaataacacaagttaatgacgttattttcctgatgtcactgagtaccatcttggtgttaattgtcactgtttagtttaccctctgttctctgtattgttctaacaagccaaccccagcccagaatcggtaagctgctccttaaaaatgaaacgggagaaagcttgacattgtgtacctatttttgttgctcagtcatacagatggaaatccataacgcaagtgggtagagtctgctggactcctggcctggtgtggccgggcagaattactcgagaagcagttgtcagactttcccttctgctggtcctaattcagccaattcagctactaatcggtcattcataaattgtgattaaaatgatcaggtaatttttaattgaaaatcatgttgtgaaatatatctacccaaagaggtaacatcctataaatagtaataattaatttagctgcagccttttcaggtattaaattatatgacaaacagttaaaatgaatttaagagtaaacataaggcatagttttcagtgaacattaataatttctcaatttgcagattagcatctgcaaaggtatcttcttccattgcataaaatgccttgtttaatagttaactaatcaaatattctgaatgacttcaaaaatttgattgaaaatttgagatatcacattatttgtactaggatttgacctaaaacaccttttatatttgttaacctttcttaaatttagttaaaatttgaagtatttctgtcgtaattataaacaaaattattttgtgttttaacatattcttggtgactctttatactttttgtgccctgaaaatttgaaggttactccaaactgtcaagatttaggatattcaagaaaagatttaactagttttagtgtcagactttaaaatttcctaaggaatttggtaagaaatagaagtccactctataagcattgaggaaactttgaaaaacctttaagtaaatgtaagactcttaatgactaaacccatcggagtggatgagtgttcccctggaggcttgtgtttgagacctgtgctgtaagcctcccacttgaccttcagcgtaatgtttcccacctgctcagagtgtcagcactcgtcactaggctttccagggctaagtccttcctgttcacatgttctcacactttttcaaatcatgaggctttctcctgtatagtaaaaatccccttaaagactcaaatctacgtcgtagttttgtcagagaccaatagtccatcgagcccccacctaccccagatctgcagcttcttagcttttatctgaatagtccttgcacagttgcttgcctctctgtcacatcagttcagcacatagcagcacatcctggtgttgccgaggtattggctagaatttattcttaattagatgtttaaagcatttactccactgttaaagttgtcttagtgtagtcaggtattgacatgacataagaaagcatgaaactaccacatttacaaaatatgagggatttggggtttggttttttttgtttgtttggttggtttttttttttttttggtttttaactattttagactcaaataatatcatacctgtgtacttgtacataaaaacaaaattattactgagtaaaaagattaatcg

SEQ ID NO: 44 - protein, 1230 aa, Rattus norvegicus
  TBP-binding protein
MASASYHISNLLEKMTSSDKDFRFMATNDLMTELQKDSIKLDDDSERKVVKMILKLLEDKNGEVQNLAVKCLGPLVSKVKEYQVETIVDTLCTNMLSDKEQLRDISSIGLKTVIGELPPASSGSALAANVCKKITGRLTSAIAKQEDVSVQLEALDIMADMLSRQGGLLVNFHPSILTCLLPQLTSPRLAVRKRTIIALGHLVMSCGNIVFVDLIEHLLSELSKNDSMSTTRTYIQCIAAISRQAGHRIGEYLEKIIPLVVKFCNVDDDELREYCIQAFESFVRRCPKEVYPHVSTIINICLKYLTYDPNYNYDDEDEDENAMDADGGDDDDQGSDDEYSDDDDMSWKVRRAAAKCLDAVVSTRHEMLPEFYKTVSPALISRFKEREENVKADVFHAYLSLLKQTRPVQSWLCDPDAMEQGETPLTMLQSQVPNIVKALHKQMKEKSVKTRQCCFNMLTELVNVLPGALTQHIPVLVPGIIFSLNDKSSSSNLKIDALSCLYVILCNHSPQVFHPHVQALVPPVVACVGDPFYKITSEALLVTQQLVKVIRPLDQPSSFDATPYIKDLFTCTIKRLKAADIDQEVKERAISCMGQIICNLGDNLGPDLSNTLQIFLERLKNEITRLTTVKALTLIAGSPLKIDLRPVLGEGVPILASFLRKNQRALKLGTLSALDILIKNYSDSLTAAMIDAVLDELPPLISESDMHVSQMAISFLTTLAKVYPSSLSKISGSILNELIGLVRSPLLQGGALSAMLDFFQALVVTGTNNLGYMDLLRMLTGPVYSQSTALTHKQSYYSIAKCVAALTRACPKEGPAVVGQFIQDVKNSRSTDSIRLLALLSLGEVGHHIDLSGQLELKSVILEAFSSPSEEVKSAASYALGSISVGNLPEYLPFVLQEITSQPKRQYLLLHSLKEIISSASVVGLKPYVENIWALLLKHCECAEEGTRNVVAECLGKLTLIDPETLLPRLKGYLISGSSYARSSVVTAVKFTISDHPQPIDPLLKNCIGDFLKTLEDPDLNVRRVALVTFNSAAHNKPSLIRDLLDSVLPHLYNETKVRKELIREVEMGPFKHTVDDGLDIRKAAFECMYTLLDSCLDRLDIFEFLNHVEDGLKDHYDIKMLTFLMLVRLSTLCPSAVLQRLDRLVEPLRATCTTKVKANSVKQEFEKQDELKRSAMRAVAALLTIPEAEKSPLMSEFQSQISSNPELAAIFESIQKDSSSTNLESMDTS

SEQ ID NO: 45 - DNA, 4383 bp, Rattus norvegicus
  TBP-binding protein
tctggcctcttgccctaagaagcgagtgcggagggagtgggagcgagactgcccgaacgcaagtgtctggcttcccggcgaggcccaggcgtccgtcccgccgcccatgaactcgttgccccgcgagcagcgccgtcgttaggccgtccccgtcactctcgctcgcccccatccccgggcagccattcccccctacccacgtctggccggggactggacgtcgtgtcgaagcgccttccccagtccgcgtcgcgctgcgaccctggaagcgggcgccgccgccaacgagaggaggagccccggccgcggggcccagcagccactgagccagcaggcgggatcgaggccggcaacatggcgagcgcttcgtaccacatctccaacttgctggaaaaaatgacatccagcgacaaggacttcaggtttatggctacaaatgatctgatgacagaactgcagaaagactccatcaagctggatgatgacagcgaaaggaaagtcgtaaagatgattctgaagttgctggaggataaaaatggcgaagtgcagaacttagctgtgaaatgtcttggtcctttagtgagtaaagtgaaagagtaccaagttgagacgattgtagacaccctctgtacaaacatgctttctgacaaggagcagcttcgagatatttccagtattggccttaaaacagtaattggagaactccctccagcttccagtggctctgcattagctgctaatgtatgtaaaaagattactggacgccttaccagtgcaatagcaaagcaggaagatgtttctgttcagctagaagctttagatattatggctgatatgttgagcaggcaaggaggactgcttgttaatttccatccttcaattctgacctgtctacttccccagctgactagccctagacttgcagtcaggaaaagaacaattattgctcttggccacctagttatgagctgcggaaacatagtttttgtagaccttattgaacatctgttgtcagagttgtccaaaaatgactccatgtcaacaacaaggacctacatacagtgtattgctgctattagtaggcaagctggccatagaataggtgaataccttgaaaagataattcctttggtggtaaaattttgtaatgtagatgatgatgaattaagagaatactgcattcaagcttttgaatcatttgtgagaagatgccctaaggaagtttatcctcatgtttctaccattataaacatttgtctaaaataccttacctatgatccaaattacaactatgatgatgaagatgaagatgagaatgctatggatgctgatggcggagatgacgatgaccaagggagtgacgatgaatacagtgatgacgatgacatgagttggaaagtgaggcgtgcggctgccaagtgcctggatgccgtagttagcacacggcatgagatgctcccggaattctacaagaccgtctctcctgcactgatatccagatttaaagagcgcgaagagaatgtaaaggcagatgtttttcatgcatacctttctcttttgaagcaaactcgtccagtacaaagttggctgtgcgaccctgatgcaatggagcaaggagaaacacccttaacaatgcttcagagtcaggttcccaacattgttaaagccctacataaacagatgaaagaaaaaagtgtaaagacccgacagtgttgttttaacatgttaactgaactggtaaatgtgttgcctggggcactaacccaacacattcctgtacttgtaccaggaatcattttctcactcaatgataagtccagctcatcgaatctgaagattgatgcattgtcctgtctgtatgtgatcctctgtaaccactctccgcaagttttccacccgcatgttcaggctttggtccctccagtggtggcttgtgttggtgacccattttacaagatcacatcagaagcccttcttgtcactcagcagcttgtcaaagtaatccgtcctctggaccaaccctcctccttcgatgcaacgccttacatcaaagatctcttcacttgtacaattaagcgcttaaaagcagctgacattgatcaggaagtcaaggagagggctatttcctgtatgggacagattatttgcaatcttggagacaatttgggccctgacttatcaaatacacttcagattttcttggagagactcaagaatgaaatcacccggctaacgacagtgaaagcactgaccctgattgctgggtcacctttgaagatagatctgaggcctgtgctgggagagggagtccctatccttgcttcatttctcaggaaaaatcagagagctttgaaactggggaccctctctgccctagatattctcattaaaaactatagtgacagtttgacggccgccatgattgatgcagttctggatgagctccctcctcttatcagcgaaagtgatatgcacgtgtcccagatggctatcagcttccttactaccctggcaaaagtatatccctcctccctttcaaagataagcggatctattctcaatgaactgattggacttgtaaggtcacctctgctgcagggaggagctcttagtgccatgctagacttcttccaagctttggttgtcactggaacaaacaatctaggatacatggatttgctgcgcatgctaacgggtccagtttactctcagagcacagctcttactcataagcagtcttactattccattgccaaatgtgtagctgcccttactcgagcatgccctaaagagggaccggctgtagtaggtcagtttattcaagatgtcaagaactccaggtctacagattccattcgtctcttagcgctcctttctctaggagaagttggacaccatattgacttaagtgggcagttggagctaaaatctgtaatattagaggctttctcctctcctagtgaagaagttaaatcagctgcatcctatgcgttaggcagcatcagtgtaggcaacctccctgagtatctgccatttgtactacaagaaataaccagtcagcccaaaaggcagtacctgctgctgcattccctgaaggaaatcattagctctgcgtcagtggtcggccttaagccgtatgtcgagaacatctgggccttgctgctaaagcactgtgagtgcgcggaggagggcaccagaaacgtcgtcgccgagtgtctagggaagctcactcttattgatcctgaaactctcctcccgaggcttaaagggtatttgatatcagggtcatcctatgccagaagctcagtggttacagctgtgaagttcactatttctgaccaccctcagcccattgatccactgctcaagaactgcataggtgattttctaaaaacgttggaagacccagatttgaatgtaagaagagtggccttggtcacattcaattctgcagcccataacaagccgtcactgatacgggaccttctggattctgttcttccacatctttacaatgagacaaaagttaggaaggaacttataagagaggtagagatgggcccgtttaagcacacggttgatgacggcctggacattagaaaggcagcttttgagtgtatgtacacacttctagacagctgtcttgacagactggatatctttgaatttctaaatcatgtggaagatggtttgaaggaccattatgatattaagatgctaacatttttaatgttggtgagactatctaccctttgtccaagtgcagtactacagaggttggaccggcttgttgagccactacgagctacgtgtacaactaaggtgaaggcgaactctgtaaagcaggagtttgaaaagcaggacgagttaaagcgctcggccatgagggcagtagctgcactgctcaccattccagaggcagagaagagccctctcatgagtgagttccagtcacagatcagctccaacccggagctggcagccatctttgaaagtatccagaaagattcttcgtccactaacttggaatcaatggacactagttagacgtgtgttccacatgaggaccattacatttgaccgcacagtgcactgaaccgacaagttgaccatagacacgggagagaagtgtctagagcttcaggatgttccacttttattttcattcatgggaagtttgttcagctttcttccattgttgtttttgtagcttttacttcagaaatctgtatttccataatccagaggttgtaagaccactgatggttttagtggttagggcaacgtttgaaatgggaactaaagtttggatttatggaatgtggaaatagggtccagtatctgtttgccctgtaatgtgtaggattaaaatgttaaaacttt

SEQ ID NO: 46 - protein, 220 aa, Rattus norvegicus
  Chromodomain-helicase-DNA-binding protein
MGADRDSPTLLPAGGSNWLAQRFHCQNGCILGDEMGLGKTCQTIALFIYLAGRLNDEGPFLILCPYVCFEQLERRNAEICSRSFLCNICSDKEERACLQQDLKQESRFHVLLTTYEICLKDASFLKSFPWSVLVVDEAHRLKNQSSLLHKTLSEFSVVFSLLLTGTPIQNSLQELYSLLSFVEPDLFSKEEWEILFNATRILRKNLSQQVNCTNSCSHFC

SEQ ID NO: 47 - DNA, 1147 bp, Rattus norvegicus
  Chromodomain-helicase-DNA-binding protein
ggctactagccgcgggggccaagcccctggcttcttactgcggcttcatactgagggccgagccgaggcggcgcgggtgcaggagcaggacttacggcatgggggctgacagggattcacctacgctcttaccagctggagggagtaactggctcgcccagcgcttccattgtcagaatggctgtatcctgggagatgagatgggcctggggaagacctgccagactattgctctcttcatttatttggcaggaagattaaatgatgaagggccatttctgattctttgtccctatgtctgttttgagcaactggaaagaagaaatgcagagatttgctccaggtctttcctgtgtaacatatgcagcgacaaggaggaaagagcctgccttcagcaagacctgaaacaggagtcacgttttcatgtgctactgactacctatgagatttgcttgaaagatgcatcatttctaaaatcattcccttggagtgttcttgttgtggatgaagctcacaggttgaaaaaccaaagctccctgctgcataagaccttgtcagagttctcagtagtcttcagtctcctgttgaccggaactcccatccagaacagcctccaagagctctactccctcctcagttttgtggagcctgatctcttttccaaggaagagtgggagattttattcaacgctaccaggatattgagaaagaatctgagtcagcaagtgaactgcacaaactcttgcagccatttctgctgagcgagtgaaagctgaggtagctacagagcttcccaagaagacagaagtagtgatataccatggcatgtccgcattgcagaagaaatactacaaggccattttgatgaaagacctagatgcatttgaaaatgagacggcaaagaaagttaaactacagaacattttgtcccagcttcgaaagtgtgtggatcacccatatttgtttgatggtgtggagccggagccttttgaagttggagaccacctgactgaggctagtgggaagcttcacctgctggataagctactagcattcctgtattctgggggccatcgggttttacttttctcccaaatgacccagatgttggatattctccaagactatatggattacagaggctacg

SEQ ID NO: 48 - protein, 433 aa, Mus musculus
  MuORC 4
MSSRKTKSNAHAECLSQVQRILRERFCHHSPHSNLFGVQVQYKHLIELLKRTAIYGESNSVLIVGPRGSGKTTLLNHALKELMEIEVSENVIQVHLNGLLQTNEKIALKEITRQLNLDNVVEDKVFGSFAENLSFLLEALQKGDRTSSCPVIFILDEFDIFAHQKNQTLLYNLFDISQSAQTPVAVIGLTCRLDILELLEKRVKSRFSHRQIHLMNSFDFPQYLKIFKEQLSLPAEFPDKAFAERWNENVHCLSEDSTVLEVLQKHFSVNKNLQSLHMLLMLALNRVTVSHPFMTSADLMEAQHMCSLDSKANIVHGLSVLEICLIIAMKHLNDIYEEEPFNFQMVYNEFQKFIQRKAHSVYNFEKPVVMKAFEHLQQLELIKPVERTSVNSQREYQLVKLLLDNTQIMNALQKYSNCPTDVRQWATSSLSWL

SEQ ID NO: 49 - DNA, 1654 bp, Mus musculus
  MuORC 4
tgcggtgggctgcagtaggagcagcgggactgagaaggtggtgaacatccttcggtcctcaccgtcggcggcggccggctttgcccgatttaggcaggcttgactgggagaggatttgaattaatcgagatgagcagtcgtaaaaccaagagtaatgcacatgcagagtgtctttcacaggtacaaagaattttacgtgaaagattttgtcatcatagtccacatagcaacctctttggagtgcaagtacaatacaagcatttgattgagctactcaaaagaactgctatctatggagaaagcaattctgtactcattgttggaccacgaggatcaggaaagaccacattattaaatcatgctttgaaagaactcatggaaatagaagtgagtgaaaatgtgatacaagttcacttaaatggactcctgcagacaaatgaaaaaattgctctgaaagagatcacaagacaattaaatctagacaatgtagttgaagataaagtttttggaagctttgctgaaaacctttcatttcttctggaagctttgcaaaaaggtgaccggactagcagttgcccagtgatcttcatactggatgaatttgatatttttgctcatcagaaaaatcaaacactcctttataatctttttgacatttctcaatctgcacagacaccagtagcagttattggacttacatgtagattggatattttggaactcttagaaaagagagtgaagtcacgattttctcaccggcagatacatttaatgaattcatttgattttccacaatatttgaaaatatttaaagaacagttatctctacctgcagaattcccagataaggcttttgctgagagatggaatgagaatgttcactgtctctctgaagattcaactgtgcttgaagtcctacagaaacatttcagtgtcaacaaaaacttgcagtcattacacatgctattgatgcttgctttaaatcgagtaaccgtatcacacccatttatgacttcagcagatctgatggaggcacagcatatgtgtagcttggattctaaggcgaatattgtacatggtctgtcagtcttggaaatctgtcttataatagcaatgaaacatttaaatgacatatatgaagaggagccctttaattttcaaatggtgtataatgaatttcagaaattcattcaaagaaaggcccattctgtttataactttgagaaacctgtggtcatgaaggcatttgagcacttacaacagttggaattaataaaacccgtggaaagaacttcagtaaattctcagagagaataccagctagtgaaactacttttggataatactcaaattatgaatgctctacagaaatactccaactgccctacagatgttaggcagtgggcaacatcctcactaagctggctgtgaagattttaagtacatttctgtgaagaccttaaagtactgttctttatttaataagatacgctactacattgctttgtttataaatagtttatgggaaatttgcacttagtatgttttgaataatgaccacgcatggacacagtttcattaatttaaattgcaccacacaagtagcagttcataagaataaaatgtgcttattttaaaaaaaaaaaaaaaaaaa

SEQ ID NO: 50 - protein, 1378 aa, Rattus norvegicus
  Carboxypeptidase D precursor
MASGWDERPPWRLESLRLLPPPPLLLLLLLLRSSAQAAHIKKAEATTTTVGGSEAAEGQFDHYYHEAALGEALEAAAAAGPPGLARLFSIGNSVEGRPLWVLRLTAGLGPPPTPAAVGLDAAGPLLPGRPQVKLVGNMHGDETVSRQVLVYLARELASGYRRGDPRLVRLLNTTDVYLLPSLNPDGFERAREGDCGLGDSGPPGTSGRDNSRGRDLNRSFPDQFSTGEPPSLDEVPEVRALIDWIRRNKFVLSGNLHGGSVVASYPFDDSPEHKTTGIYSKTSDDEVFRYLAKAYASNHPIMRTGEPHCPGDEEETFKDGITNGAHWYDVEGGMQDYNYVWANCFEITLELSCCKYPPASQLRQEWENNRESLITLIEKVHIGIKGFVKDSVTGSGLENATISVAGINHNITTGRFGDFHRLLIPGSYNLTAVSPGYMPLTINNIVVKEGPATEIDFSLQPTVMSVVPDSTEAVTTPGTVAVPNIPPGTPSSHQPIQPKDFHHHHFPDMEIFLRRFANEYPNITRLYSLGKSVESRELYVMEISDNPGVHEPGEPEFKYIGNMHGNEVVGRELLLNLIEYLCKNFGTDPEVTDLVRSTRIHLMPSMNPDGYEKSQEGDSISVVGRNNSNNFDLNRNFPDQFVPITDPTQPETIAVMSWVKAYPFVLSANLHGGSLVVNYPYDDNEQGVATYSKSPDDAVFQQIALSYSKENSQMFQGRPCKDMYLNEYFPHGITNGASWYNVPGGMQDWNYLQTNCFEVTIELGCVKYPFEKELPKYWEQNRRSLIQFMKQVHQGVKGFVLDATDGRGILNATLSVAEINHPVTTYKAGDYWRLLVPGTYKITASARGYNPVTKNVTVRSEGAIQVNFTLVRSSTDANNESKKGKGHSTSTDDTSDPTSKEFEALIKHLSAENGLEGFMLSSSSDLALYRYHSYKDLSEFLRGLVMNYPHITNLTTLGQSVEYRHIWSLEISNKPNISEPEEPKIRFVAGIHGNAPVGTELLLALAEFLCLNYKKNPVVTQLVDRTRIVIVPSLNPDGRERAQEKDCTSKTGHTNARGRDLDTDFTSNASQPETKAIIENLIQKQDFSLSIALDGGSVLVTYPYDKPVQTVENKETLKHLASLYANNHPSMHMGQPSCPNNSDENIPGGVMRGAEWHSHLGSMKDYSVTYGHCPEITVYTSCCYFPSAAQLPALWAENKKSLLSMLVEVHKGVHGLVKDKTGKPISKAVIVLNEGIRVHTKEGGYFHVLLAPGVHNINAIADGYQQQHSQVFVHHDAASSVVIVFDTDNRIFGLPRELVVTVSGATMSALILTACIIWCICSIKSNRHKDGFHRLRQHHDEYEDEIRMMSTGSKKSLLSHEFQDETDTEEETLYSSKH

SEQ ID NO: 51 - DNA, 4377 bp, Rattus norvegicus
  Carboxypeptidase D precursor
tgcggagccgctggagcggagcggtgttagcggcgttgctggaagatggcgagcggctgggatgagcggccgccctggcggctggaaagcctgcggctgctaccgccgccaccgctgctgctgctactgctgctattgaggagctcggcccaggcggcgcacatcaagaaggctgaggcgaccacgacgaccgtcggcggctccgaggcggccgagggccagtttgaccactactaccacgaagcggcgctgggcgaggcactggaggcggcagcggccgcggggccgcctggcctggcccgtctcttcagcatcggcaattcggtggagggccgaccgctgtgggtgctgcgcctcacggctggcctggggccgccgcccacccccgccgccgtggggctggacgccgcggggccgctgctgcccggccgaccgcaggtgaagctggtgggtaacatgcacggcgacgagacggtgtcgcgccaggtgttggtctacctggcccgtgagctggcgtcgggctaccgccgcggggacccgcgcctggtccgcctgctcaacaccaccgacgtatatttgctgcccagcctgaatccggatggcttcgaacgcgctcgcgagggtgactgcggcctcggcgacagcggtccgcctgggaccagcggccgagacaacagccgaggccgcgacctcaaccgcagcttccctgaccagttcagcacgggggagccaccttccctggatgaggtgccagaggtgcgcgccctcatcgactggatccgcaggaacaagtttgtgctttctggaaatcttcatggtggctcagtggtagcaagctatccttttgatgattctcccgagcataagaccactggaatctatagcaaaacctccgatgatgaagtctttcgatacttggcgaaagcttatgcttctaaccaccctataatgagaactggtgaaccccattgtccaggagatgaagaggagactttcaaagacgggatcacgaacggtgcgcactggtatgatgtggaaggtggtatgcaagattacaactatgtgtgggccaactgttttgagatcacattagaattatcttgctgcaaatacccacctgcttctcagcttcgacaagaatgggagaacaaccgtgagtctttgatcacattgattgaaaaggtccacattggaattaaaggatttgttaaagactcagtcacaggctctgggttggagaatgcaaccatctcagtggctggtattaatcataatatcacaactgggagattcggtgatttccacagactgctcattcctggaagttacaatcttacagcggtttcacctgggtatatgccgttgactattaataatatagtggtgaaagaaggaccagccacagagatagatttctcccttcaaccaactgtgatgtcagtagtgcctgactcgactgaggctgtgacaactcccggcacagttgccgttcctaatattcctcctggaacaccatcgtcccatcagccaattcagcctaaagactttcaccaccaccattttcctgacatggaaatcttcttgagaagatttgccaatgaatatcctaacatcactcgcctttattctctgggaaagtccgtagagtcgagagaactgtatgtgatggagatatctgacaacccaggcgtccatgaaccaggtgaaccagaatttaaatatattggaaatatgcatggaaatgaagtggttggaagagaactgctattgaatctcatcgaatacctctgcaagaactttggaacagaccctgaagtaacagatttggttcgcagcactagaattcacctcatgccatccatgaatcctgatgggtatgagaagtcccaagaaggagactcgataagtgtagttggcagaaacaacagcaacaactttgacctaaaccgaaatttcccagaccagtttgttccgatcacagatcctacccaacctgaaactatcgctgtgatgagctgggtgaaggcctatccgtttgtgctgtcggccaatctgcatggaggttccttggtggttaactacccttatgatgataatgaacaaggagttgccacatacagcaaatcaccagatgacgccgtgtttcaacaaatagcactttcttattccaaggaaaactcgcagatgttccaaggtagaccttgcaaagacatgtaccttaatgagtattttcctcatggcataacgaatggagcgagttggtataatgtcccaggtggtatgcaggactggaactatttacagacgaattgctttgaagtaaccatcgaactaggttgtgtgaaatatccattcgagaaggaactgccaaagtactgggagcaaaaccggagatctctaatccagtttatgaaacaggttcatcagggtgtcaaaggatttgttcttgatgccacagatggtaggggcatattaaatgccaccctcagtgttgctgaaattaatcacccagtgacgacttacaaagctggagattactggcgtctcttggtcccagggacatataaaatcacagcatctgctcgagggtataaccccgtcaccaagaacgtgaccgtcaggagtgaaggtgctattcaggtcaacttcacacttgttcgatcttcaacagatgcaaacaatgagtcaaagaaaggaaaggggcatagcaccagcactgatgacaccagcgacccaacttctaaggagtttgaagcactgatcaaacacctttcggctgagaatggcttggaaggcttcatgttaagctcgtcctcagacctggctctgtatcgataccattcctacaaagacttatccgagttcctgagaggactcgtaatgaactacccacacattacaaaccttaccactttgggacagagtgttgaatatcgtcacatttggtcccttgaaatctccaataagcccaacatatcagaacctgaagaaccgaagattcgttttgttgctggtatccatggaaacgctccagttggcactgaactgcttttggctctggcagaatttctttgcctgaattacaaaaagaatccagttgttacccaattggttgacaggactagaattgtgattgtcccctctctgaatccagatgggagagagcgagcacaggagaaagactgtacctcgaagactgggcacacaaatgcccgtggcagggacctggacacagacttcacaagtaatgcttcccaacctgagaccaaagccatcattgaaaacttgattcaaaaacaggatttcagcctttccattgctttagatggtggttctgtgctggtcacatatccgtacgacaagccagtccagacagtggaaaacaaagaaacgttaaagcatctggcgtctctttatgcaaataaccacccatcaatgcacatgggtcagcccagttgcccaaataattcagatgagaacataccaggaggagtgatgcggggagcagagtggcacagtcacctgggcagcatgaaggattatagtgtcacctatggccattgcccagaaatcacagtatacacaagctgctgctacttcccaagtgcagctcaactccctgccctatgggcagagaacaagaagtctctcctcagcatgctggtggaggtccacaaaggagtccatgggttagtaaaagacaagactggtaaaccaatctctaaagcagtaattgtactcaatgaaggaataagagtacacacaaaagaggggggttatttccatgtgcttttagctcctggggtccataacatcaatgccatcgctgatggatatcagcaacagcattcacaggtctttgtgcatcatgatgcagccagttctgtggtgatagtctttgatacagataaccggatatttggtttgccaagggaacttgtggtaactgtgtcaggtgccaccatgtcagcgctgatcctcacggcttgcatcatttggtgcatctgctctatcaagtctaacagacacaaagatggcttccaccggctgcggcagcatcatgatgaatatgaagatgaaattcgcatgatgtcaactggctctaagaagtcccttttaagccatgagttccaggatgaaacggacacagaggaagagacattatattctagcaaacattgagaagcacggtttgcatatctccctgcttaagtaccaggcaaatgacagctcctcttgggagacactgcagtaagaagagagattccttcctccttcaaagagctttgggaagttagcctgctaaattcatactctctgaatgtcacaggcagttttgaacttcccttccttaaaagtactcttaaccttttcctt

SEQ ID NO: 52 - protein, 452 aa, Rattus norvegicus
  Ich-1
MAASSGRSQSSLHRKGLMAADRRSRILAVCGMHPDHQETLKKNRVVLAKQLLLSELLEHLLEKDIITLEMRELIQAKGGSFSQNVELLNLLPKRGPQAFDAFCEALRETRQGHLEDLLLTTLSDIQHILPPLSCDYDSSLPFSVCESCPPHKQSRLSTDTMEHSLDNGDGPPCLQVKPCTPEFYQAHYQLAYRLQSQPRGLALVMSNVHFTGEKDLEFRSGGDVDHTTLVTLFKLLGYNVHVLYDQTAQEMQEKLQNFAQLPAHRVTDSCIVALLSHGVEGGIYGVDGKLLQLQEVFRLFDNANCPSLQNKPKMFFIQACRGDETDRGVDQQDGKNHAQSPGCEESDAGKEELMKMRLPTRSDMICGYACLKGNAAMRNTKRGSWYIEALTQVFSERACDMHVADMLVKVNALIKEREGYAPGTEFHRCKEMSEYCSTLCQQLYLFPGYPPT

SEQ ID NO: 53 - DNA, 4377 bp, Rattus norvegicus; identical to SEQ ID NO: 51
  Ich-1

SEQ ID NO: 54 - protein, 339 aa, Rattus norvegicus
  Cathepsin B
MWWSLIPLSCLLALTSAHDKPSSHPLSDDMINYINKQNTTWQAGRNFYNVDISYLKKLCGTVLGGPNLPERVGFSEDINLPESFDAREQWSNCPTIAQIRDQGSCGSCWAFGAVEAMSDRICIHTNGRVNVEVSAEDLLTCCGIQCGDGCNGGYPSGAWNFWTRKGLVSGGVYNSHIGCLPYTIPPCEHHVNGSRPPCTGEGDTPKCNKMCEAGYSTSYKEDKHYGYTSYSVSDSEKEIMAEIYKNGPVEGAFTVFSDFLTYKSGVYKHEAGDVMGGHAIRILGWGIENGVPYWLVANSWNVDWGDNGFFKILRGENHCGIESEIVAGIPRTQQYWGRF

SEQ ID NO: 55 - DNA, 1904 bp, Rattus norvegicus
  Cathepsin B
gagcgactgcgggcccaggttgtcgcgctgcgctcggtgagtacaggatccagcttccaggatgtggtggtccttgatccctctctcttgtctgctggcactgaccagtgcccatgacaagccttcctcacacccactgtcggacgacatgattaactatatcaacaaacagaatacaacatggcaggctggacgcaacttctacaatgttgacataagctatctgaagaagctgtgtggaactgtcctgggtggacccaacctgccggaaagggttgggttcagcgaggacataaatctacctgaatcctttgatgcacgggaacagtggtccaattgcccgaccatcgcacagatcagagaccaggggtcctgtggctcttgttgggcatttggggcagtggaagccatgtctgaccgaatctgcattcacaccaatggccgagtcaatgtggaggtgtctgctgaggacctgcttacctgctgtggtatccagtgtggggatggctgtaatggtggctatccctctggagcatggaacttctggactagaaaaggcctggtttctggtggagtatacaattctcatataggctgcttaccctacaccatccctccctgtgaacaccatgtcaatggctcccgtcccccatgcactggagagggagatactcccaagtgcaacaagatgtgtgaggctggctactccacatcctacaaggaagataagcactatgggtacacttcctacagtgtgtctgacagcgagaaggagatcatggcggaaatctacaaaaatggcccagtggagggtgcttttactgtgttttctgacttcttgacttacaaatcaggcgtatacaagcatgaagccggtgatgtgatgggaggccatgccatccgcattctgggctggggaatagagaatggagtaccctactggctggtagcaaactcctggaacgttgactggggtgataatggtttctttaaaatcctcagaggagagaaccactgtggaattgaatcagaaatcgtggctggaatcccacgcactcagcagtactggggaagattctaatctgctgggacttgattgtatagtccttaggagactttttccaaaatttagcaatgcaggcagggagtgaggcagataggagtctttgattctttgagttcacctaacatgcatgaagctttcagcaaggtttgggtgactggaccagagctgccccccatcagagccaccctacctggctcccttctagcctatcccatgacagtgatcacagcctacatcctagcctctccctagactagtgctgtgtgtagcgcctgctgctgtggctctgtctgccatccctcccacccccacctcagcatccccagaccaagggctttggctgcaggatttccaaaggaatgaacaccaactacatgatgagaggacagatgccacccgccagctgcaccttgaagctagtcacttctaggactgtggcaggctttgatggcccaatgcagttctctggagaaaactacctttccccaaggcatctgcacccattgacaatggtaatgtgcccatctctccttggtcctgccctcaaccgatgcttttccagtcagggttttgttttttgttttgttttgtgtacctcaactgagttatgaagatttgtactggttttacagatcatctcatcgtatggaaaagaacaagcttcgtggtcagtttactgggtgaccggcagacaccacaatcaaactagtctggggaaaacctgcttttttgttgtaggtgccacgtaaccctgtcagtttgacaaggaatgaccgtgccaataaaccaattctccctctgcttggaaaaaaaaaaaaaaaaaaaaaaaaaaaaaaaa

SEQ ID NO: 56 - protein, 334 aa, Rattus norvegicus
  Cathepsin L
MTPLLLLAVLCLGTALATPKFDQTFNAQWHQWKSTHRRLYGTNEEEWRRAVWEKNMRMIQLHNGEYSNGKHGFTMEMNAFGDMTNEEFRQIVNGYRHQKHKKGRLFQEPLMLQIPKTVDWREKGCVTPVKNQGQCGSCWAFSASGCLEGQMFLKTGKLISLSEQNLVDCSHDQGNQGCNGGLMDFAFQYIKENGGLDSEESYPYEAKDGSCKYRAEYAVANDTGFVDIPQQEKALMKPVATVGPISVAMDASHPSLQFYSSGIYYEPNCSSKDLDHGVLVVGYGYEGTDSNKDKYWLVKNSWGKEWGMDGYIKIAKDRNNHCGLATAASYPIVN

SEQ ID NO: 57 - DNA, 1386 bp, Rattus norvegicus
  Cathepsin L
aattccgcggcgacctccggggatccgagtttgcagactacgtgtgtgcgcagctagccacctcaggtgtttgaaccatgacccctttactcctcctggctgtcctctgcttgggaacagccttagccactccaaaatttgatcaaacgtttaatgcacagtggcaccagtggaagtccacacacagaagactgtatggcacgaatgaggaagagtggaggagagcagtgtgggagaagaacatgaggatgatccagctacacaatggggagtacagcaacgggaagcacggctttaccatggagatgaacgccttcggtgacatgaccaatgaggaattcaggcagatagtgaatggctatcgccaccagaagcacaagaagggaaggttatttcaggaacctctgatgctgcagatccccaagactgtggactggagagaaaagggttgtgtgactcctgtgaagaatcagggccagtgtggttcttgctgggcttttagcgcatcgggttgcctagaaggacagatgttccttaagactggcaaactgatctcactgagtgaacagaaccttgtggactgttctcacgatcaaggcaatcagggctgtaatggaggcctgatggattttgctttccagtacattaaggaaaatggaggtctggactcagaggagtcttatccctatgaagcaaaggatggatcttgtaaatacagagctgagtatgctgtggctaacgacacagggtttgtggatatccctcagcaagagaaagccctcatgaagcctgtagcgacggtggggcctatttctgttgccatggatgcaagccatccgtctctccagttctatagttcaggtatctactatgaacccaactgtagcagcaaggacctcgaccatggggttctggtggttggctatggttatgaaggaacagattcaaataaggataaatactggcttgtcaaaaacagctggggtaaagaatggggtatggatggctacatcaaaatagccaaagaccggaacaaccactgcggacttgccaccgcagccagctatcctatcgtgaattgatggacagcgataataaggactgacggacactacatccgaaggagttcatcttaaaactgaccaaacccgtctctgagtgagaccatggtacttgaatcgttcaggatccaagtcacgatttaaattctgttgacatttttacatgggttaaatgttaccactacttaaaactcctgttataaacagctttataatattggacacttaatgcttaattctgattctggaatatttgttttataaaagttgtataaaactttctttaccttttaaaaataaattttagctcagtgcaaaaaaaaaa

SEQ ID NO: 58 - protein, 803 aa, Rattus norvegicus
  Dipeptidyl aminopeptidase-related protein
MTTAKEPSASGKSVQQQDQELVGSNPPQRNWKGIAIALLVILVICSLIVTSVILLTPAEDTSLSQKKKVTVEDLFSEDFKIHDPEAKWISDKEFIYRERKGSVILRNVETNNSTVLIEGKKIESLRAIRYEISPDKEYALFSYNVEPVYQHSHTGYYVLSKIPHGDPQSLDPPEVSNAKLQYAGWGPKGQQLIFIFENNIYYCAHVGKQAIRVVSTGKEGVIYNGLSDWLYEEEILKSHIAHWWSPDGTRLAYATINDSRVPLMELPTYTGSVYPTVKPYHYPKAGSENPSISLHVIGLNGPTHDLEMMPPDDPRMREYYITMVKWATSTKVAVTWLNRAQNVSILTLCDATTGVCTKKHEDESEAWLHRQNEEPVFSKDGRKFFFVRAIPQGGRGKFYHITVSSSQPNSSNDNIQSITSGDWDVTEILTYDEKRNKLYFLSTEDLPRRRHLYSANTVDDFNRQCLSCDLVENCTYVSASFSHNMDFFLLKCEGPGVPTVTVHNTTDKRRMFDLEANEQVQKAIYDRQMPKIEYRKIEVEDYSLPMQILKPATFTDTAHYPLLLVVDGTPGSQSVSERFEVTWETVLVSSHGAVVVKCDGRGSGFQGTKLLHEVRRRLGFLEEKDQMEAVRTMLKEQYIDKTRVAVFGKDYGGYLSTYILPAKGENQGQTFTCGSALSPITDFKLYASAFSERYLGLHGLDNRAYEMTKLAHRVSALEDQQFLIIHATADEKIHFQHTAELITQLIKGKANYSLQIYPDESHYFHSVALKQHLYRSIIGFFVECFRIQDKLPTATAKEDEEED

SEQ ID NO: 59 - DNA, 2672 bp, Rattus norvegicus
  Dipeptidyl aminopeptidase-related protein
ctcttcttctgccgagcccgtctctgctctttgcatttaaagagcaaactaggctgctctccccagctccctccccccaccgccccccaaaaacctggtcattttggaagtatggactaaaatcgctctcctcctcaccctaccattccgatcccggtgcctccaaagtcacagtcagacccctcctgtgtctggggtggcgagtgcccggacagaccatgaccaccgccaaggagcccagcgcctcaggaaaatctgtacagcagcaggatcaggagctggtggggagtaatcctccacagagaaactggaaaggaatcgccattgcactgcttgtcatccttgtcatctgctccctgattgtcacctcagtcatcctgctgaccccagcggaagataccagtctgtctcagaagaagaaggtgactgtggaagatcttttcagtgaagacttcaaaatccatgacccagaggcaaagtggataagcgataaggaattcatctacagagaacggaaagggagcgtcatactgcggaacgttgagacaaataattccacggtgttaatagaaggcaaaaaaattgaatcgttaagagccatcagatatgaaatatccccagataaagagtatgcgttgttttcctataatgtggaaccggtataccaacactcccacactggatattatgttctgagcaaaattcctcacggggaccctcagagtctggacccaccagaagtcagcaacgcgaagcttcagtatgcagggtggggcccgaaaggccagcagctgatatttatctttgagaacaacatctactactgtgcccatgttggaaagcaggcgattcgagtggtctctacggggaaggagggtgtgatctacaatggcctcagcgactggctgtatgaagaggagattctgaagagccacatcgcacattggtggtcgccagatggtacaaggctcgcctatgccaccatcaatgattcccgagttccacttatggagctgccaacctacacgggctctgtctaccccactgtgaagccctaccactatcctaaggctggcagtgaaaaccccagcatctccctccacgtcatcggcttgaatggacccacccacgacctggagatgatgccacctgacgacccccgcatgagagagtattacatcaccatggtgaagtgggccaccagcaccaaggttgctgtgacctggctgaaccgggcccagaatgtgtccatcctgaccctctgtgatgccaccacaggtgtctgcactaagaaacacgaggatgaaagtgaagcttggctccacagacagaatgaagagcccgtgttctccaaggatggccggaagtttttctttgtcagagcgatcccacagggaggccggggtaaattctaccacatcactgtatcctcatcccagcccaacagcagcaatgacaacatccagtccattacctctggggactgggatgtgaccgagatcctgacctacgatgagaagcggaataagctctatttcctaagcacagaggacctgccacgaagacgacacctctacagcgccaacacggtagacgacttcaacaggcagtgtctgtcatgtgacctggtggagaactgcacctatgtcagtgcttccttcagtcataacatggacttcttcctgctcaagtgtgaaggccctggcgtacccactgttactgtgcacaataccacggataagagaagaatgtttgacttggaagcaaatgagcaagtgcagaaagccatctacgatcggcagatgcctaaaattgaataccggaaaattgaagtggaagattacagcttgccaatgcaaatcttgaagccggccaccttcactgacacagcccactaccctttattgctcgtggtggatggtactccagggagtcagagcgtgtcagagaggtttgaagtgacctgggagacagtgttggtgagcagccatggagcagtggtggtcaagtgtgacggccgaggcagcggctttcagggaaccaagctcttgcacgaagtacggaggcggctaggcttcctggaggagaaggaccagatggaagctgtgagaaccatgctgaaggagcagtacattgacaagactcgggtagctgtgtttgggaaggattatggtgggtacctgagtacttacatcctcccagccaagggagaaaaccaaggccagactttcacctgcggctctgcactctctccgataacggacttcaaactctatgcctcagcattttccgagaggtaccttggcctccatggactcgacaacagagcgtatgagatgaccaagctggcacacagagtgtcagcactggaggaccagcagttcctgatcatccatgctacggctgacgaaaaaatccatttccagcacacagcagagctcatcacgcagctaatcaagggaaaggccaattacagcttacagatatacccagatgaaagtcactactttcacagcgtggcgctcaaacagcacctgtacaggtccatcatcggattctttgtggaatgtttcaggatccaggacaagctacctacagccacagcgaaagaggacgaggaggaggactaaccacgcttgagacctaaacacagacatggctctttctacaac

SEQ ID NO: 60 - protein, 255 aa, Rattus norvegicus
  Proteasome subunit C8
MSSIGTGYDLSASTFSPDGRVFQVEYAMKAVENSSTAIGIRCKDGVVFGVEKLVLSKLYEEGSNKRLFNVDRHVGMAVAGLLADARSLADIAREEASNFRSNFGYNIPLKHLADRVAMYVHAYTLYSAVRPFGCSFMLGSYSVNDGAQLYMIDPSGVSYGYWGCAIGKARQAAKTEIEKLQMKEMTCRDVVKEVAKIIYIVHDEVKDKAFELELSWVGELTKGRHEIVPKDVREEAEKYAKESLKEEDESDDDNM

SEQ ID NO: 61 - DNA, 897 bp, Rattus norvegicus
  Proteasome subunit C8
cgttctgtggcctgccgggtcagcaccatgagctccattggcactgggtatgacctgtcagcctctacattctctcctgatggaagagttttccaagttgaatatgctatgaaggctgtggaaaacagtagtacagctattgggatcagatgtaaagatggtgttgtgtttggggtagaaaaattagtcctttctaaactttatgaagaaggctccaataaacgtcttttcaatgttgatcgacatgttggaatggcagtggcaggtttgttggcagatgctcgttccttggcagacatagcaagagaagaagcgtccaactttaggtctaactttggctataacattcctctaaaacatcttgcagacagagtggccatgtatgtacacgcgtatacactctacagtgctgttagaccttttggctgcagtttcatgttggggtcttacagtgtgaatgatggtgcacagctctatatgatcgatccatcaggtgtttcatatggttactggggctgtgccattggcaaagccaggcaagctgcaaagacagaaatagaaaagcttcagatgaaggaaatgacctgccgtgatgtagttaaagaagttgcaaaaataatttacatagtacatgatgaagttaaggataaagcttttgaactagagctcagctgggttggtgaattaactaaaggaagacatgaaattgttcccaaagacgtaagagaggaagcagagaaatatgccaaggaatctttgaaggaagaagatgaatcagatgacgacaatatgtaacatttcaccatcctctggtgtccatttctgtgacagttgcatatggctagcaccatggattatatatacccactgaccaattttcattaaattttgtcttat

SEQ ID NO: 62 - protein, 1080 aa, Mus musculus
  Deubiquitinating enzyme 8
MPAVASVPKELYLSSSLKDLNKKTEVKPEKTSTKNYIHSAQKIFKTAEECRLDRDEERAYVLYMKYVAVYNLIKKRPDFKQQQDYYLSILGPANIKKAIEEAERLSESLKLRYEEAEVRKQLEEKDRREEEQLQQQKRPEMGREDSGAAAKRSVENLLDSKTKTQRINGEKSEGAAAAERGAITAKELYTMMMDKNTSLIIMDARKIQDYQHSCILDSLSVPEEAISPGVTASWIEANLSDDSKDTWKKRGSVDYVVLLDWFSSAKDLLLGTTLRSLKDALFKWESKTVLRHEPLVLEGGYENWLLCYPQFTTNAKVTPPPRSRAEEVSVSLDFTYPSLEEPVPSKLPTQMPPPPIETNEKALLVTDQDEKLRLSTQPALAGPGAAPRAEASPIIQPAPATKSVPQVDRTKKPSVKLPEDHRIKSENTDQSGRVLSDRSTKPVFPSPTTMLTDEEKARIHQETALLMEKNKQEKELWDKQQKEQKEKLRREEQERKAGKTQDADERDSTENQHKAKDGQEKKDSKQTKTEDRELSADGAQEATGTQRQSKSEHEASDAKVPVEGKRCPTSEAQKRPADVSPASVSGELNAGKAQREPLTRARSEEMGRIVPGLPLGWAKFLDPITGTFRYYHSPTNTVHMYPPEMAPSSAPPSTPPTHKVKPQVPAERDREPSKLKRSYSSPDITQALQEEEKRRPAVTPMVNRENKPPCYPKAEISRLSASQIRNLNPVFGGSGPALTGLRNLGNTCYMNSILQCLCNAPHLADYFNRNCYQDDINRSNLLGHKGEVAEEFGIIMKALWTGQYRYISPKDFKVTIGKINDQFAGSSQQDSQELLLFLMDGLHEDLNKADNRKRHKEENNEHLDDLQAAEHAWQKHKQLNESIIVALFQGQFKSTVQCLTCRRRSRTFEAFMYLSLPLASTSKCTLQDCLRLFSKEEKLTDNNRFYCSHCRARRDSLKKIEIWKLPPVLLVHLKRFSYDGRWKQKLQTSVDFPLENLDLSQYVIGPKNSLKKYNLFSVSNHYGGLDGGHYTAYCKNAARQRWFKFDDHEVSDISVSSVRSSAAYILFYTSLGPRITDVAT

SEQ ID NO: 63 - DNA, 3970 bp, Mus musculus
  Deubiquitinating enzyme 8
gcgagtcttacttcatcatgcctgctgtagcttcagttcctaaagaactctacctcagttcttcactaaaagacctcaataagaagaccgaagttaaacctgagaaaaccagcaccaagaattatatacacagcgcgcagaagatcttcaagacagcagaagaatgcagactagatcgtgatgaggaaagggcctatgtgctttatatgaaatatgtggcagtttataatcttatcaaaaagagacctgatttcaagcaacagcaggattattatctttcaatacttggacctgcaaacatcaaaaaagctattgaagaagctgaaagactctccgaaagccttaaactaagatacgaagaggctgaagttcggaaacaacttgaagaaaaggacagacgggaggaagagcagctgcagcaacagaaaaggccggagatggggagagaggacagcggtgcggcagccaaacgctctgtggaaaatttactggattccaaaaccaaaacccaaaggattaacggcgagaagagtgaaggagctgcagctgcagagagaggagccatcacagcaaaggaactatatacgatgatgatggataaaaacacaagcttaattataatggatgctcgaaaaatacaggattatcagcattcctgtatcttggattctctcagtgttcctgaagaagctatcagtccaggagtcactgctagttggattgaagcaaacctctcagatgattctaaagacacatggaaaaagagggggagtgtggactatgtggtccttctcgactggtttagttcagcgaaagatttgctgcttgggaccactctacggagtctgaaagatgcacttttcaagtgggaaagtaaaactgtcctgcgccatgagcctttggtgttggagggcggctatgaaaactggctgctttgctacccgcagtttacaaccaatgctaaggtcactccaccccctcggagcagagctgaagaggtgtctgtctcattggattttacttatccctcattggaagaaccagttccttccaaacttcctacccagatgccacctcctcctatagaaacaaatgaaaaggcactgttggtaactgatcaagatgaaaagctgagactgtcaacccagccagctctagctggacctggtgcggctcccagagctgaagcctcacccataattcagccagcgcctgctacaaagagtgttccacaggttgatcgtacgaaaaaaccgtcagtcaagttgcctgaagatcatagaataaaatctgaaaatacagatcagagtggaagagttctttctgatcgatccaccaagccagtatttccctctccaaccaccatgttaacagatgaagaaaaggctcgtattcatcaagaaactgcccttcttatggaaaagaataaacaggagaaggaactttgggacaagcagcagaaggaacagaaagagaagctgagaagggaggaacaagagcgcaaagctggaaagacacaggatgcagatgaacgtgactccactgagaatcagcacaaagcaaaggatggacaagagaaaaaagacagcaaacagaccaagacggaagacagagagctttcagcagacggggcccaggaagccacaggaacacaaagacaaagtaagagtgagcatgaagcttctgatgctaaggtacctgtggaaggtaaaaggtgtcccacgtcagaggcgcagaagaggccagcagatgtgtcccctgcatccgtgtcaggagagctgaatgcaggcaaggctcagcgagaacctttgacgagagcacgaagtgaagaaatggggagaattgtgccgggactgcctttgggctgggccaagtttcttgatccaatcaccgggacctttcgttactaccattcccccacaaacacagttcatatgtatccacctgaaatggctccttcgtctgcacctccttccaccccgcccactcacaaagtcaagccccaggtccctgccgagcgggacagggagccatcgaaactgaagcgctcctactcctcaccagatatcactcaggccctgcaggaggaggagaagaggaggccggcagtgaccccgatggtcaaccgggaaaacaagccaccatgttaccctaaagctgagatttcgaggctttctgcttctcagattcggaacctcaatcctgtatttggaggatcaggaccagctcttactggacttcgtaatttgggaaatacttgttacatgaactcaatcttgcagtgcctgtgtaatgctccacatctggctgattatttcaaccgaaactgctaccaggatgatatcaacaggtcaaatttgttggggcataaaggtgaagtggcagaagaatttggtataatcatgaaagcactgtggacaggacagtatagatacatcagtccaaaggactttaaagtcaccattggtaagattaatgaccagtttgcaggctccagccaacaggattcacaagagctgcttctgttcctcatggatggcctgcatgaggatctgaataaggctgacaatcggaagaggcacaaggaagagaacaacgagcacctggatgacctgcaggcggccgagcacgcctggcagaagcacaagcagctcaacgagtccatcatcgtggccctgttccagggccagttcaagtccacagtgcagtgcctcacctgccgcaggaggtcgcgcaccttcgaggccttcatgtacttgtctttgccgctagcatccacaagtaaatgtactctacaggactgccttagattattttccaaagaagaaaagcttacagataacaacagattttactgcagccattgccgagctcggcgggattctctaaagaaaatagaaatctggaaattacctcctgtgctgttagtgcacctgaaacgattttcctatgacggcaggtggaagcagaagctgcaaacatccgtggatttcccattggaaaatcttgacctgtcacagtacgttattggtccaaaaaacagcttgaagaaatataacttgttttctgtttcaaaccactacggcgggctagacggaggccactacacagcctactgtaagaacgcggcaaggcagcgctggtttaagtttgatgaccatgaagtttctgatatctctgtgtcttctgtgaggtcatcagcagcttatatcctcttttatacttccctgggaccacgcataactgatgtagccacatagagaggagtaggctgtcggcttattgacgtctacaaattgcagcctcacatctaatgcttacaaagataatggatcgctgcagctgctatgtagagggattccagaacactggggctgtgctactagcaccatataattcaggccagtgctgtttatcaaaagaaagaaagaaagaaaacagcctgacatttaacaactatcatagtacgcattccttacaggagtcatttatttcaaaacaactttttgagtctgccccaaagttaaaataattcattagtcagacatttattattctcttggtaccaaaccatcataacctccattttcctattcactgctccagcctcttctcatttctagccccagctcagtgcactctgaatgctctagaatgacctagctcagataggaatgtatatgtacatatttattgcactgttgcacatcagactgctggacacagtttaacatagccttctgtgaaagcctagaaaggattttttctttttcttttggcctcttctaggtagctgcaatgctttcttaaggaaatgacagggcaaaactatttttctgttggcttccggctgtatttgtgcactaaatctttattctaaacaaatggaaactttaattttttaaaaataattcatttacatctacattaaaatcctaaaaaaaaaaaaaaaaaaaaaaaaaaaaaaaaa

SEQ ID NO: 64 - DNA, 1203 bp, Homo sapiens
  Ubiquitin-binding enzyme E2
actcgtgcgtgaggcgagaggagccggagacgagaccagaggccgaactcgggttctgacaagatggccgggctgccccgcaggatcatcaaggaaacccagcgtttgctggcagaaccagttcctggcatcaaagccgaaccagatgagagcaacgcccgttattttcatgtggtcattgctggccctcaggattccccctttgagggagggacttttaaacttgaactattccttccagaagaatacccaatggcagcccctaaagtacgtttcatgaccaaaatttatcatcctaatgtagacaagttgggaagaatatgtttagatattttgaaagataagtggtccccagcactgcagatccgcacagttctgctatcgatccaggccttgttaagtgctcccaatccagatgatccattagcaaatgatgtagcggagcagtggaagaccaacgaagcccaagccatagaaacagctagagcatggactaggctatatgccatgaataatatttaaattgatacgatcatcaagtgtgcatcacttctcctgttctgccaagacttcctcctctttgtttgcatttaatggacacagtcttagaaacattacagaataaaaaagcccagacatcttcagtcctttggtgattaaatgcacattagcaaatctatgtcttgtcctgattcactgtcataaagcatgagcagaggctagaagtatcatctggattgttgtgaaacgtttaaaagcagtggcccctccctgcttttattcatttcccccatcctggtttaagtataaagcactgtgaatgaaggtagttgtcaggttagctgcaggggtgtgggtgtttttattttattttattttattttatttttgaggggggaggtagtttaattttatgggctcctttcccccttttttggtgatctaattgcattggttaaaagcagctaaccaggtctttagaatatgctctagccaagtctaactttatttagacgctgtagatggacaagcttgattgttggaaccaaaatgggaacattaaacaaacatcacagccctcactaataacattgctgtcaagtgtagattccccccttcaaaaaaagcttgtgaccattttgtatggcttgtctggaaacttctgtaaatcttatgttttagtaaaatattttttgttattct

SEQ ID NO: 65 - protein, 475 aa, Mus musculus
  Tryptophan t-RNA ligase
MADMPSGESCTSPLELFNSIATQGELVRSLKAGNAPKDEIDSAVKMLLSLKMSYKAAMGEEYKAGCPPGNPTAGRNCDSDATKASEDFVDPWTVRTSSAKGIDYDKLIVQPGSSKIDKELINRIERATGQRPHRFLRRGIFFSHRDMNQILDAYENKKPFYLYTGRGPSSEAMHLGHLVPFIFTKWLEDVFNVPLVIQMSDDEKYLWKDLTLEQAYSYTVENAKDIIACGFDINKTFIFSDLEYMGQSPGFYRNVVKIQKHVTFNQVKGIFGFTDSDCIGKSSFPAVQAAPSFSNSFPKIFRDRTDIQCLIPCAIDQDPYFRMTRDVAPRIGHPKPALLHSTFFPALQGAQTKMSASDPNSSIFLTDTAKQIKSKVNKHAFSGGRDTVEEHRQFGGNCEVDVSFMYLTFFLEDDDRLEQIRKDYTSGAMLTGELKKTLIDVLQPLIAEHQARRKAVTEETVKEFMTPRQLSFHFQ

SEQ ID NO: 66 - DNA, 2786 bp, Mus musculus
  Tryptophan t-RNA ligase
cagctgtcagcttgagcacccttggactacacagccaggagtcctgtctcaactgctgaacacactactcacaagccagctgcaggcctcggtcctagaagatggcagacatgcccagtggcgagtcctgcacctctccactggagctgttcaacagcatagctactcaaggggagctcgtgaggtccctcaaagctggaaatgcaccaaaagatgagattgattctgcagtaaagatgttgttatcattaaaaatgagctataaggccgccatgggggaggagtacaaggctggctgccctcctgggaacccaacagctgggagaaattgtgactctgatgccacaaaagccagcgaggattttgtggatccatggacggtccggacaagcagtgcaaaaggcatcgactatgacaagctcattgttcagcccggaagcagcaaaattgacaaagagctgataaaccgaatagagcgagccactggccaaagaccgcaccgcttcctgcgccggggcatcttcttctcccaccgagatatgaatcaaattctggatgcctatgaaaataagaagccattctacctgtacacaggcaggggcccctcctccgaagcaatgcatctgggtcatctcgtcccgtttattttcacaaagtggctagaggatgtgttcaatgtgcctttggtcatccagatgtctgacgacgagaagtacctgtggaaggacttgactctggagcaggcatatagctacaccgtagaaaatgcaaaggacatcattgcctgtggcttcgacatcaacaaaactttcatcttctctgatcttgagtatatggggcagagcccgggcttctacaggaacgtggtgaagattcagaagcacgtcaccttcaaccaagtgaaaggcattttcggctttacggacagtgactgcatcgggaagagcagttttcctgctgtccaggccgcgccatcgttcagcaactctttcccgaagatcttccgagacaggacagatatccagtgcctcatcccgtgtgccattgaccaggatccgtacttcagaatgacaagggacgtggcccccaggatcggccatcctaaacctgccctgctgcactcgaccttcttccctgccctgcagggcgctcagaccaagatgagtgccagtgaccccaactcctccatcttcctcactgacacggccaagcagatcaagagcaaggtcaacaagcatgcattttctggaggaagagatactgtggaggagcacaggcagtttgggggcaactgtgaagtggatgtatccttcatgtatctgaccttcttccttgaagatgacgacaggctggagcagatcagaaaggattacaccagcggagccatgctcaccggggagctcaagaagacgctcatagacgtccttcagcccctgatcgcagagcaccaggcccgacgcaaggcggtcactgaggagaccgtgaaggagttcatgacgccccggcagctgtccttccacttccagtaatgtctcttttctgtggcaagcctgtctgtaacccaccctgtcaaatcaagtcacactcccaataggcttctcacgtggtaattcctggacctgggtctctgtgcacgtgtcgatcctggatgctgtttcttctctgatgtctccccgtctgttgtctgctacgggtgatcaagcgatgctaatgttgtgtggtcagatagaaccccagcccgcagtctctcccacaaagagcccagaggtagtgcttccctggcccacagaagactgtccagctagcagcctggggttccagaacaaattctgaaatgtattccagtttttctttaaagtgcgtgtgcccggttggccacggtggggtgcactgtatcatctctgttctcaggaggctgagacacgaggtctgagccagcctggtagtaatctgcctttgattctgctgctgtggagtcacaatgtcattactgtaaaactgaacactgctgtgaggaactgacaaggagacatgtagtggacatgccgctgctccagcccacgcccccccccacacacgcacacacacttacatgtaatgtgtgcaaactttgctttatacttgctaagaagccatcagctttgttctgaaggtgtagctcagtagtagagcactcgcctagcaccctgctggcccgggttcagtctcctgccccacgaagccgggcggataactgagctctctgcttttaaccctgattatggaccaggctgggtctttccactaacctgaggctgaggtagctaacctccagctcccgtgtgccgtccactccaaaatcatacgttgcgcccttggtgtactaacttccccacagatggcccagactccaccctgtgacgtgcagggctgcagctcctgcccccgggtcctgaggacggccttgttccctttgcaggtgcttctgctttgacacttgactgacggggagggcaggccagagcagtgtgctggccatgcctcaggccgttgaccatagctagacagaaaagaacagcagccgtccaggccgcagcgttctcctctgggcgggctgcatggaatgagcctccactcagagtcttggaaaagcagaagccgtacctcagggaaagcccctggttgaagtgtctgtcctctctgaagcaacaagggccactctgagtgttctctccttgcatcatttttaggaaaaaacaataaactttgttgagctccaaaaaaaaaaaaaaaaaaaaaaaaaaaaa

SEQ ID NO: 67 - protein, 364 aa, Rattus norvegicus
  Aldolase A
MPHPYPALTPEQKKELADIAHRIVAPGKGILAADESTGSIAKRLQSIGTENTEENRRFYRQLLLTADDRVNPCIGGVILFHETLYQKADDGRPFPQVIKSKGGVVGIKVDKGVVPLAGTNGETTTQGLDGLSERCAQYKKDGADFAKWRCVLKIGEHTPSSLAIMENANVLARYASICQQNGIVPIVEPEILPDGDHDLKRCQYVTEKVLAAVYKALSDHHVYLEGTLLKPNMVTPGHACTQKFSNEEIAMATVTALRRTVPPAVPGVTFLSGGQSEEEASINLNAINKCPLLKPWALTFSYGRALQASALKAWGGKKENLKAAQEEYIKRALANSLACQGKYTPSGQSGAAASESLFISNHAY

SEQ ID NO: 68 - DNA, 1442 bp, Rattus norvegicus
  Aldolase A
gtcccccccaccccagctgaataggctgcgttctcttggaacgcgccgcagaacgaggttctgtgaccctagccgcgttccctccttagttcctttcgcctacccacccgcgtacccgacagacccaccccgtcctgtgccaggaaagcgctgccaccggcaccatgccccacccatacccagcactgaccccggagcagaagaaggagctggctgacatcgctcaccgaattgtagctccgggcaagggcatcctggctgcagacgagtccactggaagcattgccaagcgcctgcagtccattggcaccgagaacaccgaggagaacaggcgcttctaccgccaactgctgctgactgccgatgaccgtgtgaatccctgcattggaggggtgatccttttccacgagacactgtaccagaaggcagatgatggccgtcccttcccccaagttatcaagtccaagggtggtgttgtgggcattaaggtagataagggtgtagtgcccctggctggaaccaatggcgagaccactactcaagggctggacgggctgtctgagcgctgtgcccagtataagaaggatggagccgactttgccaagtggcgctgtgtgctaaagattggggagcatactccctcgtccctcgccatcatggaaaatgccaatgttctggcccgttacgctagcatctgccagcagaatggcattgtacccattgtggagcctgaaattctccctgatggggaccatgacttgaagcgctgccagtatgtaactgagaaggtactggcagctgtctacaaggctctgagtgaccaccatgtctatctggaaggcacactgctgaagcccaacatggtcacccctggccatgcttgcacccagaaattttccaatgaggaaattgccatggcaaccgtcacagcacttcgtcgaacagtgccccctgccgtccctggggtcactttcctgtctggagggcagagtgaggaagaggcatccatcaacctcaatgctatcaacaagtgtcccctgctgaagccatgggccttgactttctcctatggccgagccctgcaggcctctgctctaaaggcttggggtgggaagaaggagaacctgaaggcagcccaggaggagtacatcaagcgagccctggccaacagcctcgcttgtcaaggaaagtacactccaagtggccagtctggagccgcagccagtgaatctctcttcatctctaaccatgcctactaaccagagctgatctaaggctgctccatcgacactccaggcccctgcctacccacttgctattgaagaggggccttcaggctctttcccatcactcttgctgccctcgtgtgtgcagtgttgtctgtgaatgctaaatctgccatcccttccagcccactgccaataaacagctatttaaggggg

SEQ ID NO: 69 - protein, 887 aa, Rattus norvegicus
  3-hydroxy-3-methylglutaryl coenzyme A reductase
MLSRLFRMHGLFVASHPWEVIVGTVTLTICMMSMNMFTGNNKICGWNYECPKFEEDVLSSDIIILTITRCIAILYIYFQFQNLRQLGSKYILGIAGLFTIFSSFVFSTVVIHFLDKELTGLNEALPFFLLLIDLSRASALAKFALSSNSQDEVRENIARGMAILGPTFTLDALVECLVIGVGTMSGVRQLEIMCCFGCMSVLANYFVFMTFFPACVSLVLELSRESREGRPIWQLSHFARVLEEEENKPNPVTQRVKMIMSLGLVLVHAHSRWIADPSPQNSTAEQSKVSLGLAEDVSKRIEPSVSLWQFYLSKMISMDIEQVITLSLALLLAVKYIFFEQAETESTLSLKNPITSPVVTPKKAQDNCCRREPLLVRRNQKLSSVEEDPGVNQDRKVEVIKPLVAEAETSGRATFVLGASAASPPLALGAQEPGIELPSEPRPNEECLQILESAEKGAKFLSDAEIIQLVNAKHIPAYKLETLMETHERGVSIRRQLLSAKLAEPSSLQYLPYRDYNYSLVMGACCENVIGYMPIPVGVAGPLCLDGKEYQVPMATTEGCLVASTNRGCRAISLGGGASSRVLADGMSRGPVVRLPRACDSAEVKSWLETPEGFAVVKEAFDSTSRFARLQKLHVTLAGRNLYIRLQSKTGDAMGMNMISKGTEKALLKLQEGVPELQILAVSGNYCTDKKPAAINWIEGRGKTVVCEAVIPAKVVREVLKTTTEAMVDVNINKNLVGSAMAGSIGGYNLHAANIVTAIYIACGQDAAQNVGSSNCITLMEASGPTNEDLYISCTMPSIEIGTVGGGTNLLPQQACLQMLGVQGACKDNPGENARQLARIVCGTVMAGELSLMAALAAGHLVRSHMVHNRSKINLQDLQGTCTKKAA

SEQ ID NO: 70 - DNA, 4346 bp, Rattus norvegicus
  3-hydroxy-3-methylglutaryl coenzyme A reductase
  misc_feature 31: n is a or g or c or t
ataagcgcagttccttccgccctggtctccnttggctggagacggcggaagggcggcttggtggcctccattgagatccggaggatccaaggactgtgtagctacaatgttgtcaagacttttccgtatgcatggcctctttgtggcctcccatccctgggaggtaattgtgggaacggtgacacttactatctgtatgatgtccatgaacatgttcaccggcaacaacaagatctgtggttggaattatgagtgcccaaaatttgaagaggacgtgctgagcagcgacatcatcatcctcacgataacccggtgcatcgccatcctgtacatctacttccagttccagaacctgcgtcagcttgggtcaaagtacattttgggtattgccggcctcttcacaattttctcaagtttcgtcttcagcactgtcgtcattcatttcctcgacaaagaattgacaggcttaaatgaagctttgccctttttcctgctcttgattgacctttctagagcgagtgcattggccaagtttgccctgagttcaaactcacaggatgaagtaagggagaatatagcgcgtgggatggcgatcctgggccccacgttcacccttgacgctctggtggaatgtcttgtgattggagttggcaccatgtcaggggtgcggcagcttgagatcatgtgctgctttggctgtatgtccgtgcttgccaactactttgtcttcatgacattcttcccagcctgcgtgtccctggtcctagagctttctcgggaaagccgtgagggtcgtccaatttggcagctcagccattttgccagagttttagaagaagaagagaataaaccaaacccagtaacccaaagggtcaagatgatcatgtctttaggcctggttcttgttcacgctcacagtcgctggatagctgatccttctcctcagaacagcacagcagaacagtctaaggtttccttgggtctggctgaagatgtgtccaagagaattgagccgagtgtttctctctggcagttttacctctccaagatgatcagcatggacatcgagcaagtgattaccctgagcttagcgttgcttttggctgtcaagtatattttctttgaacaagcagagacagaatcaacactctcattaaaaaatcctatcacatctcctgtcgtgaccccaaagaaagctcaagacaactgttgtagacgtgagcctctgcttgtgaggaggaaccagaagctttcgtcagtggaggaggatccaggagtgaaccaagacagaaaagttgaggttataaaacctttagtggcagaagccgagacttcgggcagagctacgtttgtgcttggcgcctctgcagccagccctccattggccctgggggcacaggagcctgggatcgaactccccagcgagcctcgacctaatgaagagtgtctacagatactggagagtgcagagaaaggtgcgaagttccttagtgatgcagagatcatccagttggtcaatgctaagcacatcccagcctacaaactggaaaccctcatggagacgcacgagcgtggtgtgtctattcgccggcagctcctctccgccaagcttgcagagccatcttctctgcagtacctgccttacagagactataattactccttggtgatgggagcttgctgtgagaacgtgatcggatatatgcccatccctgttggagtggcaggacctctgtgcctggatggaaaagagtaccaggtgccaatggcaacaacagaaggttgtcttgtggccagcacgaacagaggctgcagagcgatcagtcttggtggaggtgccagcagccgggtccttgcagatgggatgagccgaggcccagtggtgcgtcttcctcgtgcttgtgactcagcagaggtgaagagctggcttgaaacacctgaagggtttgcagtggtaaaggaggccttcgacagcacgagcagatttgcacgtctacagaaacttcacgtgacgctggcaggacgcaacctctacatccgtctccagtccaaaacgggggacgccatggggatgaacatgatttccaagggtacggagaaagcacttctgaagctgcaagagggcgtgccggagctgcagatactggcggtcagtggtaactattgcaccgacaagaaacctgctgccataaactggatcgaagggagaggaaagactgtggtttgtgaagctgtcattccagccaaggtggtgagagaagtattaaagacgactacggaagctatggttgacgtaaacattaacaagaatcttgtgggctctgccatggctggtagcataggaggctacaacctccatgctgccaacatcgtcactgccatctacattgcatgtggccaggatgcagcacagaatgtggggagttcaaactgtattacgttaatggaagcaagtggtcccacaaatgaagacttatacatcagctgtaccatgccgtctatagagatcggaaccgtgggtggtgggaccaaccttctacctcagcaagcctgcctgcagatgctaggtgttcaaggggcgtgcaaagacaatcctggagaaaatgcacggcagcttgcacgaattgtgtgtggcactgtgatggctggtgagttgtccttgatggcagcattggcagcaggacatcttgtcagaagtcacatggttcacaacagatcaaagataaatttacaagatctgcaaggaacatgcaccaagaaggcagcttgagcatcctgacatactggactgaaacacgggcattgggttctccaggactaacatgaaatctgtgaattaaaaatgtcagtgcagtgtcttgtggaagatgaacgtgatcagtgaggcaggcacctgcttggtttctggcctctttagagacgtctgcggtcctttgcacagactcctcagacgtgggaactatggttctttccgtgccgtgttctagaaaatctcatgtggatgtcatgtgctctgagcaccacagatgtgactgcagctcgtttctgaaagctgccacaagctggaagctggtgttttgacgaaatgatggatcctggtgatcagtgtggggctcacctccaatgggttaaaatggagttttaaatgacactgtagctgacagaacttctgatttttatttattcagtctgggttgtagaactttgcaatctaagtttattttttgtaaactaataattcatttggtgctggtctattgatttttggggacctacttcttcatggaagaattacttttattctcaaactacagaataatgtgctaagtagtgctaaatagttctcgacgaagaaaagagtcgctgtgttcatctcagtctttgttcagagaggcctttagctgtgcacagtctgcactaaagacacagagctcttagtgttagagcagagtacaagcaggtcggacctctcaggacttagagtgtgggagcagtttttaaagaaaacaaccattgctctaagccaactttcttgggagacattttaacttatttagctgaattctagatttcttggtaaactatcaaatctgtatatgttgtaataaagtgtctaatgctaggagtttattggaagtgtttaagaaataaaagtactcatcagcttttacacggataaaatgctctagcttgggccagagaagacctcgctcaggagcattggtccgggaaagcctggcttgcttgccgagcctaatgaagggaagtcagcctacagagccagtgatggagccacatgaatggccctggagctgtgtgccttgttcctgtggccaggagttaggtgactgaatcatttatgggctcctttggtggaccccataaaagctcttagcttccctcagggggggtcagcagagttgttgaatcttaattttttttttaatgtaccagtttgtgataaataataataaagagctccttattttgtattctatctaatgcttcgtttggtcttggaagcggacgtctgtgtagaagacggactctgaaagtgagcatcgatgacgcgcgcgcgcgcgactgacgctagtgatggctagatatgtggaaggtagcttcgtgtgtatgtaaagtttccagttgcgcctcttgtgacttttcagccagtaccattttatttacctgagcttgtcgtgggaagtggtagtaaaccgcattgagtgttgatgctggtgacttgtgatcagtgtcatcgtgctaagtccatgttttgtacaattactaaattgtatacattttgttatagaatactttttccagttgagtaattatgaaaggaagtt

SEQ ID NO: 71 - protein, 610 aa, Rattus norvegicus
  NADH subunit 5
MNMMTILILMILDLLTTPITFSMTILTKLMYFRHMLITSIKFSFLLSLLPLLLFFHHNTEYMITNWHWLTINSIKLTMSFKIDYFSILFLSVSLFVTWSIMQFSSWYMHSDPHINRFIKYLMMFLNNMLILTSANNLFQLFIGWEGVGIMSFLLIGWWYGLADANTAALQAILYNRVGDIGFILAMTWFCLNMNSWELQQIFLTNTNNNLVPLTGLLIAATGKSAQFGLHPWLPSAMEGPTPVSALLHSSTMVVAGIFLMIRFHPLTSNNSTIMTAMLCLGAITTLFTAICALTQNDIKKIVAFSTSSQLGLMMVTLGINQPYLAFLHICTHAFFKAMLFMCSGSIIHILNDEQDIRKMGNMMKAMPFTSSCLIIGSLALTGMPFLTGFYSKDLIIEAINTCNTNAWALMITLIATSMTAVYSMRIIYFVTMTKPRYSPLITINENNPNLINPIKRLALGSILAGFLISLNIPPTNIQILTMPWHLKMTALLITILGFAIALELNNLTLNLSMSKPTKLSSFSTSLGYYPPIMPRIIPQKTLNSSYKLSLNLLDLIWSEKTIPKSTSITQTQLSKMMSNQKGLIKLYFLSFLITISLIFILHTLNPEWFQ

SEQ ID NO: 72 - protein, 300 aa, Rattus norvegicus
  Electron transfer flavoprotein alpha-subunit
EGTAGLTRTETMFRAAAPGQLRRAASLLRFQSTLVIAEHANDSLAPITLNTITAAGRLGGEVSCLVAGTKCDKVVQDLCKVAGVAKVLVAQHDAYKGLLPEELTPLILETQKQFSYTHIVAGASAFGKNLLPRVAAKLNVAPVSDIIEIKSPDTFVRTIYAANALCTVKCDEKVKVFSVRGTSFEAAAASGGSASSEKAPSSSSAGISEWLDQKLTKSDRPELTGAKVVVSGGRGLKSGENFKLQYDLADQLHAAVGASRAAVDAGFVPNDMQVGQTGKIVAPELYIAVGISGAIQHLAG

SEQ ID NO: 73 - DNA, 1241 bp, Rattus norvegicus
  Electron transfer flavoprotein alpha-subunit
gagggtaccgctgggctgactagaacagagacaatgtttcgagcagcggcgcctgggcagctccggcgggcggcctcgttgctccgttttcagagcaccttggtaatagctgagcatgcgaatgattctctagcacctattactctaaacactatcactgcagctggacgtcttggaggtgaagtgtcctgcttagtagctggaacaaaatgtgacaaggtggtacaggatctctgtaaagtagcaggcgtggcaaaggttctggtggctcagcatgatgcgtacaaaggccttcttccagaggaactcacaccattgattttggaaactcagaagcagttcagttacacacacatcgttgctggagcatctgcttttggaaagaaccttctgcccagagtagcagccaaacttaatgttgccccagtttctgacatcattgagatcaagtcacctgacacatttgtgagaactatctatgcagcaaatgcattgtgtacagtgaaatgtgatgagaaagtgaaggtgttttctgttcgaggaacatcttttgaggctgcagcagcaagtggaggtagtgccagttcagaaaaggcaccaagttcttcatcagcaggaatatcagagtggcttgaccagaaattgacaaaaagtgaccgaccagagctaactggtgccaaagtggtggtatctggtggtcggggcttgaagagtggagagaactttaaactgcagtatgacttggcagatcagctgcatgctgcagttggtgcttcccgtgctgctgttgatgctggctttgttcccaatgacatgcaagttggtcagacaggaaaaatagtagctccagaactttatattgctgttggaatatctggagccatccagcatttagctggatgaaggacagcaagacaattgtggctattaacaaagacccagaagctccaattttccaagtggcagattatggaatagttgcagatttatttaaggtggttcctgaaatgacagaaatactgaagaaaaaataagtcaaaatcatatcttaaggaaactgtcaaaagtattcagattgaaatcatagcaacttcataatccaaagaaagaaaatatgctaacagcagctacaatgccttttgatgaatcaattattatattcctttttaattttttgtgattccaaacaattatttttacattttctaattctataataaaaaatataataaagcgaattc

SEQ ID NO: 74 - protein, 587 aa, Rattus norvegicus; identical to SEQ ID NO: 34
  Erythroid-specific delta-aminolevulinate synthase

SEQ ID NO: 75 - DNA, 1899 bp, Rattus norvegicus; identical to SEQ ID NO: 35
  Erythroid-specific delta-aminolevulinate synthase

SEQ ID NO: 76 - protein, 559 aa, Rattus norvegicus; identical to SEQ ID NO: 36
  Polypeptide GalNAc transferase

SEQ ID NO: 77 - DNA, 1838 bp, Rattus norvegicus; identical to SEQ ID NO: 37
  Polypeptide GalNAc transferase

SEQ ID NO: 78 - protein, 354 aa, Rattus norvegicus
  Arginase II
MFLRSSVSRLLHGQIPCALTRSVHSVAVVGAPFSRGQKKKGVEYGPAAIREAGLLKRLSMLGCHIKDFGDLSFTNVPKDDPYNNLVVYPRSVGIANQELAEVVSRAVSGGYSCVTLGGDHSLAIGTISGHARHHPDLCVIWVDAHADINTPLTTVSGNIHGQPLSFLIRELQDKVPQLPGFSWIKPCLSPPNLVYIGLRDVEPAEHFILKSFDIQYFSMRDIDRLGIQKVMEQTFDRLIGKRKRPIHLSFDIDAFDPKLAPATGTPVVGGLTYREGLYITEEIHSTGLLSALDLVEVNPHLATSEEEAKATASLAVDVIASSFGQTREGGHIAYDHLPTPSSPHESEKEECVRI

SEQ ID NO: 79 - DNA, 1463 bp, Rattus norvegicus
  Arginase II
cgcgcttgcctagtgaagctgcgaacgtgtgggaggctgcactcactcgaggtcctgagttgcgcggagctgcttctgctagggcgatcgcctccctgcaatcatgttcctgaggagcagcgtctcccgtctcctccacgggcaaattccttgtgccctgacgagatccgtccactctgtagctgtagtcggagcccctttctctcggggacagaaaaagaaaggagtggaatatggcccagccgccatccgagaagctggcttgctgaagaggctttctatgttgggatgccatataaaagactttggagacttgagttttactaacgttcccaaagatgatccctacaataatctggtcgtgtatcctcgctcagtgggcattgccaaccaggaactggctgaggtggttagtagagctgtgtcaggtggctacagctgtgtcacactgggaggagaccacagcctggcaatcggtaccattagtggccatgcccgacaccacccagatctctgtgtcatctgggttgatgctcatgctgacattaatacacccctcaccactgtatcaggaaatatccatgggcagcctctttcctttctcatcagagaactacaagacaaggtaccacaactgccaggattttcctggatcaaaccttgcctctctcccccaaatcttgtatacattggcttacgagatgtggagcctgccgaacactttattttaaagagttttgacatccagtatttctccatgagagatattgatcgacttggtatccagaaggtcatggaacagacatttgatcggctgattggcaagaggaagaggccgatccacctgagctttgacatagatgcatttgaccctaagctggctccagccacaggaacccctgtggtaggggggctgacctacagagaaggactgtacattactgaagaaatacatagcacagggttgctgtcggctctggatcttgttgaagtcaatcctcatttggccacttctgaggaagaggccaaggctacagccagcctagcagtggatgtgattgcttcaagttttggtcagacaagagaaggcggacacattgcctatgaccaccttcctactcctagttcaccacatgaatcagaaaaggaagaatgtgtgagaatttaggaaacactgtactctggcacctttcacgacagcattccagagttgggaggcatttaaagggacaaagagtaaatggctgtctggatccaatattgccttaatgagaacatctgtgcactctcacaagtgtagagtccccttctctattttggtcacaatactatcactgtaaatgtatctgttgggtttttgtttctgaagtttacaagctattgttattatacacgtgtgtttgaaggagtcataaacagcatttattaccttaaaaaaaaaaaaaaaaaaaaaaaaaaaaaaa

SEQ ID NO: 80 - protein, 270 aa, Rattus norvegicus
  ATP synthase gamma subunit
RDITRRLKSIKNIQKITKSMKMVAAAKYARAERELKPARVYGTGSLALYEKAEIKGPEDKKKHLIIGVSSDRGLCGAIHSSVAKQMKNDMAALTAAGKEVMIVGIGEKIKSILYRTHSDQFLVSFKDVGRKPPTFGDASVIALELLNSGYEFDEGSIIFNQFKSVISYKTEEKPIFSFSTVVAAENMSIYDDIDADVLQNYQEYNLANIIYYSLKESTTSEQSARMTAMDNASKNASDMIDKLTLTFNRTRQAVITKELIEIISGAAALD

SEQ ID NO: 81 - DNA, 975 bp, Rattus norvegicus
  ATP synthase gamma-subunit
cgagacattaccaggagactgaagtccatcaaaaacatccagaagattaccaagtctatgaagatggtggcagcagcgaagtacgcccgggctgagcgggagctgaagccagctcgagtgtatgggacaggctccttggctctgtatgagaaggctgagattaagggacctgaggacaagaagaagcacctcattattggtgtgtcctcggatcgaggcctttgtggtgctattcattcctccgtggctaaacaaatgaagaatgacatggctgccctcacagcagctgggaaagaagttatgattgttggaattggtgaaaaaatcaagagcatactttataggactcactctgatcagtttttggtgtccttcaaagacgtggggcggaagccccctacttttggagatgcatcggtcattgccttggagttgttaaattcgggatatgaatttgatgaaggctctattatctttaatcagttcaagtctgttatctcctacaagacagaagagaagcccatcttctctttcagtaccgtcgtggctgctgagaacatgagcatttatgatgacattgatgctgacgtgctgcagaattaccaggaatacaatctggccaacatcatctactactccctgaaggagtccaccaccagtgagcagagtgccaggatgaccgccatggacaacgccagcaagaacgcctctgatatgattgataaattgacgctgactttcaaccgcacccgccaggccgtcatcacgaaggagctgatagagatcatctccggggctgctgctctggattaatgagaatcaagttacatcctcagacaagaggtgaagaaggaaaaggcagctgattttaactgattgctgtccttgttagaagaaacttggtccactgagtcacaaagacagcaggatgtttgtaaattatcttacaataaacaacttacaatgagaaaaacg

SEQ ID NO: 82 - protein, 285 aa, Rattus norvegicus
  N-G, N-G dimethylarginine dimethylaminohydrolase
MAGLSHPSVFGRATHAVVRAPPESLCRHALRRSQGEEVDFARAERQHQLYVGVLGSKLGLQVVQLPADESLPDCVFVEDVAVVCEETALITRPGAPSRRKEVDMMKEALEKLQLNIVEMKDENATLDGGDVLFTGREFFVGLSKRTNQRGAEILADTFKDYAVSTVPVADSLHLKSFCSMAGPNLIAIGSSESAQKALKIMQQMSDHRYDKLTVPDDMAANCIYLNIPSKGHVLLHRTPEEYPESAKVYEKLKDHLLIPVSNSEMEKVDGLLTCCSVFINKKTDS

SEQ ID NO: 83 - DNA, 3008 bp, Rattus norvegicus
  N-G, N-G dimethylarginine dimethylaminohydrolase
  misc_feature 2411, 2412: n is a or g or c or t
ccacatgatttattacaatcatctcctcaatagccacactatttattttatttcaattaaaaatttcttcccaaacctttcctgcacctccctcacccaaaactatagccacagaaaaaacgaataacccttgagaatcaaaatgaacgaaaatctatttgcctctttcattacccccacaataataggtctaccaattgttgtgaccattattatgttcccatcaattctattcccatcatcagaacgcctaatcagcaaccgactacactcatttcaacactgactaatcaaacttatcatcaaacaaataatgttaatcggagccgccgggcgctcgcaggctcgcaggctcgcaggttgggcgcgcgctgctctcgggaagacccggccaccgagccaaaccccgccgccgcctctccgcgcgagccatggccggcctcagccacccctcggtcttcggccgggccacccacgccgtggtgcgggctccgcccgagtccctgtgccgccacgcgctgaggcgctcccagggcgaagaggtggatttcgctcgcgctgagcgccagcaccagctctacgtgggcgtgctgggcagcaagctggggctgcaggtggtgcagctgccggccgacgagagcctgcctgactgcgtgttcgtggaggacgtggccgtggtgtgcgaggagaccgccctcatcacccgccccggggcgcctagccgcaggaaggaggttgacatgatgaaagaggctttggaaaaacttcagctcaacatagtagagatgaaagatgaaaatgcaaccttagatggtggggacgtcctattcacaggcagagagttttttgtgggcctttccaaaaggacaaatcaacgaggtgctgagatcttggctgatactttcaaggactacgcagtttccacagtccccgtggccgattctttgcatttaaagagtttctgcagcatggctggccccaacctgatcgcaatagggtccagtgaatctgcgcagaaggccctcaagatcatgcaacagatgagtgaccaccgttatgacaagctcactgtaccggacgacatggccgccaactgtatatatttaaatatccccagcaaagggcatgtcttgctgcaccgaaccccagaagagtacccagaaagcgcaaaggtttatgagaagctcaaggaccatctactgatccctgtgagcaattctgagatggaaaaggtggacggcttgctcacctgctgctccgtttttattaacaagaagacagactcttgagcggaagagtccctcccgagcggccggcgagtggcctaggccaggctgatgatggctctgtacccattcctcctgtttcctttgacaatctactgtgccactaactcttgtttacaaagaattccaatcttaatcgcctcatttccccacacccccctcttcctcacggggccccctaacctgtgcacacatttgctcaatgaactaagcaacctaggaaatacagaactaacgaatcattggaatgtgattgatagcgtggaggcactcactccagcctctgtgtccttagtgtgggaatagtttagatgcagggcatcctgaaggactgacctcctgggcagacagataaacaagcaagggactttctttgcttcatgagttgcgtttggttcctgtgagagtcctgagaacgtggattttttcccattcccctctcttctcacctctaaaacactttcttccaggtcttcctttggccttcctcacttctttcgtaatcaccttgaacctggatttatccaaggtctcgaactctggataccctcctaacgtccaccctgtctacgtgcagtcctctcctcctcacagccacaacttctgccaccaccagcaaatcagagtggctggttggagacgaggaacctcacagaggcacatcctgacagggtttcccattagcacacctaggaaggtaaattcaggtggttgatacaggatgttagatacagaagcctagaaacacccccatgggtacatctcagagagactgagtcactgccatgattttgcctcatgactggtcctataggagcgtggaggaaagtctttctccaccccaccacctccccctttttcagcttccttctgactcaaccttgtatctacccccttagaatcaccatgattttgaaaagtcatttccttcaaaagaggcagaacatctaatgattgttgacggtctggtaagagctagagggaactgcctccacccaaggcctaggagcacaatcaggaaatggttcctaaagtcaacttcaaacaatgtgtgagtctcctttgaaatatccatgactgtttactgtggaattcaaccgaaacttcaaattacacaactttcannagacgcaggtctctcacagggaacaataccacagcaaaggaattcctttcttgaaagctgaaacaggccaaggacatggtaccttacaaggcacggtgacccagccaggcatctcatcaaacttctggtcacttctaccttggctgtatagcctgcagtctgtcattcgatatttaaagttggggagacaaaggctatgtcagctctagctctccttacctctctttgtgatcagtgtttcttctagtgaaggcaagagagactgggcctcatctcgtccccctcagtggccggaagtgagaaaatcaagacttcctttaccgcccttctcttagttggcaacctctctgaagaggtctccatctctcccttgctgtctaactctagactcatatcgcatgccaatatctaactgtacaccctgtgaatgaaccatatcctggtcactgtcacatttcacagcgtatcacaggtgaacagttatgccttctccagggcaagggaatatgagacagttgcctaaattcataaagaaaaattgttctcagccattatggttgccttgaggggttaaagttgaccccacctacactagc

SEQ ID NO: 84 - protein, 515 aa, Mus musculus
  Glucocerebrosidase
MAARLIGFFLFQAVSWAYGAQPCIPKSFGYSSVVCVCNASYCDSLDPVTLPALGTFSRYESTRRGRRMELSVGAIQANRTGTGLLLTLQPEKKFQKVKGFGGAMTDATALNILALSPPTQKLLLRSYFSTNGIEYNIIRVPMASCDFSIRVYTYADTPNDFQLSNFSLPEEDTKLKIPLIHQALKMSSRPISLFASPWTSPTWLKTNGRVNGKGSLKGQPGDIFHQTWANYFVKFLDAYAKYGLRFWAVTAENEPTAGLFTGYPFQCLGFTPEHQRDFISRDLGPALANSSHDVKLLMLDDQRLLLPRWAEVVLSDPEAAKYVHGIAVHWYMDFLAPAKATLGETHRLFPNTMLFASEACVGSKFWEQSVRLGSWDRGMQYSHSIITNLLYHVTGWTDWNLALNPEGGPNWVRNFVDSPIIVDIPKDAFYKQPMFYHLGHFSKFIPEGSQRVALVASESTDLETVALLRPDGSAVVVVLNRSSEDVPLTISDPDLGFLETVSPGYSIHTYLWRRQ

SEQ ID NO: 85 - DNA, 1684 bp, Mus musculus
  Glucocerebrosidase
ccacagaaacttccacagtcttctcattcgctggtcctgagtagctccagtttccaagatcttctggagagaagtgtgctggtgtcatggctgccaggctcatcggattcttcctatttcaggcggtatcttgggcatatggtgcccaaccctgcatccccaaaagctttggctacagctcagtggtctgtgtctgtaatgcatcgtactgtgactctcttgaccccgtgaccttaccggctctgggtaccttcagccgttacgagagcactcgacgtggacgtcggatggagctgagtgtcggggccatccaggccaatcgcactggcacagggttactactcactttgcagccagaaaagaagttccagaaagtgaaaggatttggaggcgccatgacagacgccactgcgctcaacatccttgctttgtccccacctactcagaagctgctactcagatcctacttctctaccaacggaattgaatataacatcatccgggtacccatggccagttgtgacttctccatccgtgtctatacctatgctgacacccctaacgacttccagttatccaacttcagcctcccagaagaagacaccaagctcaagatacccctgattcaccaagccctgaagatgtcctcacgccccatttcactctttgccagtccctggacatcacccacttggctcaagaccaatggaagagtgaatgggaaggggtcgctcaagggtcagccaggggatatctttcaccagacctgggccaattactttgtcaagtttctggatgcttatgctaagtatggcctaagattctgggcagtgacagcggagaatgaacctacagcagggctcttcacggggtaccccttccagtgcctgggcttcactcctgaacaccagagagacttcatttcccgtgacctagggccagcccttgccaacagttcccatgatgtgaagctactcatgctagatgaccaacgcttgctgctaccccgctgggcagaggtggtgctctctgatccagaggcagctaagtacgttcatggcattgctgttcactggtatatggatttcctggctccagccaaagctactttaggagagacacaccgcttgttccccaacacaatgctctttgcttcggaggcctgcgtgggctccaagttctgggaacagagtgttcggttgggctcctgggatcgagggatgcagtacagtcacagcatcattacgaacctcctttaccacgtaactggatggacggactggaaccttgccctgaatcctgaaggagggcccaactgggtccgcaactttgtcgatagccccattattgtcgacatccccaaagacgcattttacaaacagcccatgttctaccatcttggccacttcagcaagttcattcccgagggatcccagagagtggcgttggtggccagtgagagcactgacttggaaacagtagcactgttacgccctgacggctctgcagttgtggtcgtgttaaaccgatcttcggaggatgtccctcttaccatcagtgatcctgacctgggcttcctggagaccgtgtcacctggctactccattcacacttacctgtggcgtcgccagtgatggaactgacacctgagcaggcacctgggcttagcatggacattaaaggg

SEQ ID NO: 86 - protein, 552 aa, Homo sapiens
  N-acetylglucosamine-6-sulphatase
MRLLPLAPGRLRRGSPRHLPSCSPALLLLVLGGCLGVFGVAAGTRRPNVVLLLTDDQDEVLGGMTPLKKTKALIGEMGMTFSSAYVPSALCCPSRASILTGKYPHNHHVVNNTLEGNCSSKSWQKIQEPNTFPAILRSMCGYQTFFAGKYLNEYGAPDAGGLEHVPLGWSYWYALEKNSKYYNYTLSINGKARKHGENYSVDYLTDVLANVSLDFLDYKSNFEPFFMMIATPAPHSPWTAAPQYQKAFQNVFAPRNKNFNIHGTNKHWLIRQAKTPMTNSSIQFLDNAFRKRWQTLLSVDDLVEKLVKRLEFTGELNNTYIFYTSDNGYHTGQFSLPIDKRQLYEFDIKVPLLVRGPGIKPNQTSKMLVANIDLGPTILDIAGYDLNKTQMDGMSLLPILRGASNLTWRSDVLVEYQGEGRNVTDPTCPSLSPGVSQCFPDCVCEDAYNNTYACVRTMSALWNLQYCEFDDQEVFVEVYNLTADPDQITNIAKTIDPELLGKMNYRLMMLQSCSGPTCRTPGVFDPGYRFDPRLMFSNRGSVRTRRFSKHLL

SEQ ID NO: 87 - DNA, 2379 bp, Homo sapiens
  N-acetylglucosamine-6-sulphatase
ggaattccggtcggcctctcgcccttcagctacctgtgcgtccctccgtcccgtcccgtcccggggtcaccccggagcctgtccgctatgcggctcctgcctctagccccaggtcggctccggcggggcagcccccgccacctgccctcctgcagcccagcgctgctactgctggtgctgggcggctgcctgggggtcttcggggtggctgcgggaacccggaggcccaacgtggtgctgctcctcacggacgaccaggacgaagtgctcggcggcatgacaccactaaagaaaaccaaagctctcatcggagagatggggatgactttttccagtgcttatgtgccaagtgctctctgctgccccagcagagccagtatcctgacaggaaagtacccacataatcatcacgttgtgaacaacactctggaggggaactgcagtagtaagtcctggcagaagatccaagaaccaaatactttcccagcaattctcagatcaatgtgtggttatcagaccttttttgcagggaaatatttaaatgagtacggagccccagatgcaggtggactagaacacgttcctctgggttggagttactggtatgccttggaaaagaattctaagtattataattacaccctgtctatcaatgggaaggcacggaagcatggtgaaaactatagtgtggactacctgacagatgttttggctaatgtctccttggactttctggactacaagtccaactttgagcccttcttcatgatgatcgccactccagcgcctcattcgccttggacagctgcacctcagtaccagaaggctttccagaatgtctttgcaccaagaaacaagaacttcaacatccatggaacgaacaagcactggttaattaggcaagccaagactccaatgactaattcttcaatacagtttttagataatgcatttaggaaaaggtggcaaactctcctctcagttgatgaccttgtggagaaactggtcaagaggctggagttcactggggagctcaacaacacttacatcttctatacctcagacaatggctatcacacaggacagttttccttgccaatagacaagagacagctgtatgagtttgatatcaaagttccactgttggttcgaggacctgggatcaaaccaaatcagacaagcaagatgctggttgccaacattgacttgggtcctactattttggacattgctggctacgacctaaataagacacagatggatgggatgtccttattgcccattttgagaggtgccagtaacttgacctggcgatcagatgtcctggtggaataccaaggagaaggccgtaacgtcactgacccaacatgcccttccctgagtcctggcgtatctcaatgcttcccagactgtgtatgtgaagatgcttataacaatacctatgcctgtgtgaggacaatgtcagcattgtggaatttgcagtattgcgagtttgatgaccaggaggtgtttgtagaagtctataatctgactgcagacccagaccagatcactaacattgctaaaaccatagacccagagcttttaggaaagatgaactatcggttaatgatgttacagtcctgttctgggccaacctgtcgcactccaggggtttttgaccccggatacaggtttgacccccgtctcatgttcagcaatcgcggcagtgtcaggactcgaagattttccaaacatcttctgtagcgacctcacacagcctctgcagatggatccctgcacgcctctttctgatgaagtgattgtagtaggtgtctgtagctagtcttcaagaccacacctggaagagtttctgggctggctttaagtcctgtttgaaaaagcaacccagtcagctgacttcctcgtgcaatgtgttaaactgtgaactctgcccatgtgtcaggagtggctgtctctggtctcttcctttagctgacaaggacactcctgaggtctttgttctcactgtattttttttatcctggggccacagttcttgattattcctcttgtggttaaagactgaatttgtaaacccattcagataaatggcagtactttaggacacacacaaacacacagatacaccttttgatatgtaagcttgacctaaagtcaaaggacctgtgtagcatttcagattgagcacttcactatcaaaaatactaacatcacatggcttgaagagtaaccatcagagctgaatcatccaagtaagaacaagtaccattgttgattgataagtagagatacattttttatgatgttcatcacagtgtggtaaggttgcaaattcaaaacatgtcacccaagctctgttcatgtttttgtgaattc

SEQ ID NO: 88 - DNA, 3225 bp, Rattus norvegicus
  12S rRNA
gtcaacaaacccccccaccccctacacctgaaacttcaatgccaaaccccaaaaacattaaagcaagaattaaataaaacaaaaagctaacttaattcttaaaaggcttctccgttctagtagaccacaaaattttaacttaaatcttagcattggtaaaatttcccgacacaaaatctttcctccctaactaaaccctctttacttgctctaaccctcagaaaattccacatacaccaaagttaatgtagcttataataaagcaaagcactgaaaatgcttagatggattcaaaaatcccataaacacaaaggtttggtcctggccttataattaattggaggtaagattacacatgcaaacatccataaaccggtgtaaaatcccttaaagatttgcctaaaacttaaggagagggcatcaagcacataatatagctcaagacgccttgcctagccacacccccacgggactcagcagtgataaatattaagcaatgaacgaaagtttgactaagctagtacctctcagggttggtaaatttcgtgccagccaccgcggtcatacgattaacccaaactaattattttcggcgtaaaacgtgccaactataaatctcataatagaattaaaatccaacttatatgtgaaaattcattgttaggacctaagcccaataacgaaagtaattctaatcatttatataatgcacgatagctaagacccaaactgggattagataccccactatgcttagccctaaaccttaataattaaacctacaaaattatttgccagagaactactagctacagcttaaaacacaaaggacttggcggtactttatatccgtctagaggagcctgttctataatcgataaaccccgttctaccttaccccttctcgctaattcagcctatataccgccatcttcagcaaaccctaaaaaggcactaagttagcacaagacaacataaaacgttaggtcaaggtgtagccaatgaagcggaaagaaatgggctacattttcttttcccagagaacattacgaaacccttatgaaactaaaggacaaaggaggatttagtagtaaattaagaatagagagcttaattgaatagagcaatgaagtacgcacacaccgcccgtcaccctcctcaaattagattgacattcacatatacataatttcactaacaaatttatgagaggagataagtcgtaacaaggtaagcatactggaaagtgtgcttggaataatcacagtgtagcttaatcacaaagcatctggcctacacgcagaagaattcataaaaaatgaacactttgaactaaccctagccctacaaccaaccaacataactaaacccccacataaactaaaacatttaactcaaaaagtattggagaaagaaatttacttaccaagagctatagagaaagtaccgcaagggaaatgatgaaagactaatttaaagtaaaaacaagacaaagattaaacctgtaccttttgcataatgaattaactagaaaatccttaacaaaaagaatttaagctaagaaccccgaaaccaaacgagctacctaaaaacaatttcatgaatcaacccgtctatgtagcaaaatagtgggaagatttttaggtagaggtgaaaagcctatcgagcttggtgatagctggttgcccaaaaaagaatttcagttcaaactttaagcttccatcagaacaacaaatcaaaatgtaaacttaaaatatagccaaaagagggacagctctttaggaaacggaaaaaaccttaaatagtgaataaacaactacaatcacttaaccattgtaggcttaaaagcaagccatcaataaagaaagcgtcaagccacatcatcttacacacacactaattccacaaacctcaaaaattccaaaattacaaattgggctaaatctatgatcctagtgaatactgttaatatgtgaacaagaaccaatccaccaagcacaagtgctaagacaaccggataaccattgttaattattgaatcataggcataacccaacaatagaattacctatccctaactcgttagcccaacacaggcgtgctttaaggaaagtttaaaaaagtaaaggaactcggcaaacacgaaccccgcctgtttaccaaaaacatctcctctagcataacaagtattagtggcatcgcctgcccagtgactaaagttccacggccgcggtatcccgaccgtgcaaaggtaggataatcacttgttccttaattagggactagaatgaatggctaaacgagggtccaaccgtctcttacttgcaatcagtgaaattgaccttccagtgaaggggcggactcataataaaagacgagaagaccctatggagctttaatttactaatttcaatttatataaaaaaacctaatgggcgaaaacaacaaaattatgaactaccaaatttcggttggggtgacctcggagaataaaaaatcctccgaatgattataaccgagtcggtaaccgtgtccgacccagtcaagtaatactaatatcttattgacccaattattgatcaacggaccaagttaccctagggtaacagcgcgacctatttaagagttcatatcgacaattagggtttacgacctcgatgttggatcaggacatcccaatggtgcagaagctattaatggttcgtttgttcaacgattaaagtcctacgtgatctaagtccggcaatccaggtcggtttctatctatttacaatttctcccagttacgaaaggacaagagaaatggagaccaaccaatcctaggcttccaaccaatttagaaaaacttaataaagtatatatgtacaataaataaccttagacccaagttattagggtggcagagccaagtaattgcgtaagacttaaaaccttgttcccagaggttcaaatcctctccctaatagtgtactttattaatatcctaacactcctaatcccaatcttaattgccataggccttctcaccctagtagaacggaaaatcctaggctacatacaattacgcaaaggccccaacaacgaaggcccatatggtaaactacaaccatttgcagatgccataaaactattcataaaagaacccatacgccctctaaccacctcaatatcactatttattatcgccccaaccctctcccttacactagctctaagcctatgatt

SEQ ID NO: 89 - protein, 840 aa, Rattus norvegicus
  Ischemia responsive 94 kD protein
MSVVGIDLGFQSCYVAVARAGGIETIANEYSDRCTPACVSFGPKNRSVGAAAKSQVISNAKNTVQGFKRFHGRAFSDPFVEAEKSNLAYDIVQLPTGLTGIKVTYMEEERNFTTEQVTAMLLSKLKETAESVLKKPVVDCVVSVPSFYTDAERRSVMDATQIAGLNCLRLMNETTAVALAYGIYKQDLPALEEKPRNVVFVDMGHSAYQVSVCAFNRGKLKVLATAFDTTLGGRKFDEVLVNHFCEEFGKKYKLDIKSKVRALLRLSQECEKLKKLMSANASDLPLSIECFMNDIDVSGTMNRGKFLEMCDDLLARVEPPLRSILDQSKLKKEDIYAVEIVGGATRIPAVKEKISKFFGKELSTTLNADEAVTRGCALQCAILSPAFKVREFSITDVVPYPISLRWNSPAEEGSSDCEVFPKNHAAPFSKVLTFYRKEPFTLEAYYSSPQDLPYPDPAIAQFSVQKVTPQSDGSSSKVKVKVRVNVHGIFSVSSAALVEVHKSEESEEPMETDQNAKEEEKMQVDQEEPHTEEQQPQTPAENKAESEEMETSQAGSKDKKMDQPPQAKKAKVKTSTVDLPIESQLLWQLDREMLGLYTENEGKMIMQDKLEKERNDAKNAVEEYVYEMRDKLSGEYEKFVSEDDRNNFTLKLEDTENWLYEDGEDQPKQVYVDKLAELRTLGQPIKTRFQESEERPKLFEELGKQIQQYMKVISSFKNKEDQYEHLDAADMTKVEKSTNEAMEWMNSKLNLQNKQSLTADPVVKTKEIEAKIKELTNICSPIISKPKPKVEPPKEEPKHAEQNGPVDGQGDNPGTQAAEHGADTAVPSDGDKKLPEMDID

SEQ ID NO: 90 - DNA, 4521 bp, Rattus norvegicus
  Ischemia responsive 94 kD protein
cggcgcctcttctgcggccgtggagccggagccggcctgagcggtagaggcccgtctttttcaaggacccaagcatcctcgtggacggtcgtccggcttcgcccgcccagccgcggtgctccatcagcccacgcggcgcgccctctccacgcgccaaccccgtcgggttccgtgtgcagtgtcggcggccggccctgggcccgagcccgagcagtagccggcgccatgtcggtggtgggcatagacctgggctttcagagctgctatgtcgctgtggcccgcgccggcggcattgagacgatcgctaatgagtatagcgaccgctgcacgccggcttgtgtttctttcggtcctaagaatcgttcagttggagcagcagcaaagagccaggtaatttccaatgccaagaacacagttcaagggtttaaaagatttcatgggcgtgcattctcagatccatttgtggaagcagaaaaatctaaccttgcatatgatattgtacagttgcccactggattaacgggcataaaggttacatatatggaagaagagaggaattttaccactgaacaagtgactgccatgctcttgtcaaaactgaaggagacagcagaaagtgttcttaagaagcctgttgtagactgtgttgtttcggttcctagtttctacactgatgcagaacgacggtcagtgatggatgccacacagattgctggtctcaattgcttgcggttaatgaatgaaacaactgcagttgctcttgcttatggaatctataaacaagaccttcctgccttagaagaaaaaccaagaaatgtagtttttgtagatatgggacattctgcctatcaagtttctgtatgtgcatttaatagaggaaaactgaaagttttggccacagcttttgatacaacattgggaggcagaaaatttgatgaggtgttggtaaatcacttctgtgaagaatttggaaagaaatacaagctagacataaaatctaaagttcgtgctttattgcgactctctcaagagtgtgagaaactcaagaaattaatgagtgcgaatgcttcagacctccctttgagtattgaatgctttatgaacgatattgatgtatcgggaaccatgaatagaggcaaatttttggagatgtgtgatgatctcttagcaagagtggagccgccacttcgtagcatcttggaccaatccaagttaaagaaagaagatatttatgcagtggagatagttggtggagccacacggatccctgccgtgaaagagaagatcagcaagttctttggtaaagaactcagcacaacattaaatgcggatgaagcagtcactcgaggctgtgctctgcagtgtgcaatcttatcacctgctttcaaagtcagagaattttctatcactgatgtggtaccatatccaatatctttgaggtggaattctccagctgaagaggggtcaagtgactgtgaagtcttccccaaaaaccatgctgctcctttctccaaagtcctcaccttttatagaaaggaaccgttcactctggaggcctactatagttctcctcaggatttgccctatccagatcctgctatagctcagttttcagttcagaaagtcactccacagtctgatggctccagctcaaaagtgaaagtcaaggtccgggtaaatgtgcatggcattttcagtgtgtccagtgcggccttagtagaggtgcacaagtccgaggagagcgaggagccaatggagactgatcagaatgcaaaggaagaagagaagatgcaggtggaccaggaagaaccacatactgaagagcaacagccacagacaccagcagaaaacaaggcggagtctgaggagatggagacctctcaagctggatcaaaagataaaaagatggaccaaccacctcaagcaaagaaggcaaaagtgaagaccagcaccgtggacctgcccattgagagccagctgctgtggcagctggaccgggaaatgctcggcctgtacacagagaatgagggtaagatgatcatgcaggataaactggagaaggaacggaatgacgccaaaaatgcggtggaagagtatgtgtatgagatgagagacaaacttagtggtgaatatgagaagtttgtgagtgaagatgatcgtaataattttactttgaaattagaggatacagaaaactggctgtatgaagatggagaagatcaaccaaagcaagtttatgtagacaaattggctgagttaagaactttaggtcaacctattaagacacggttccaggaatctgaagaaagaccaaaattatttgaagaattagggaagcaaatccaacagtatatgaaagtgatcagctctttcaaaaacaaggaggaccagtatgaacacttggatgctgctgacatgacaaaggtagagaaaagcaccaatgaggcgatggagtggatgaatagtaagctgaacctgcagaacaaacagagcctgacggcggatccagttgtcaagacaaaagagattgaagctaaaattaaggagctgacaaatatttgcagtcctataatttcaaagcccaaacccaaagtggaaccccctaaggaggaaccaaaacatgctgagcagaatggaccagtggatggccaaggagacaacccaggcacccaagctgctgagcacggtgcagacacagctgtgccttctgatggtgacaagaagcttcctgagatggacattgattgattccaacacttgtttatattaaaacagactattataaagctttaagttgtcaactttgttctgaatatcaactagagcaagcaaatactggagatttcttagtcagtttttaggggatctcggggtggggtatataggtaatatacagagcattttgacttctaaatagttagatccagagatgaagtgcactgttctctcttcattatgatcctgtttaagagcccagctagtctttctgagctcttgcctccctccttgttttaatcatgcttctacaaggtgaagtgtgtttggggaaactgagctctaacaaaagctgtgagagccactaggcaggcttttcctcaaacatgacagaagttcaaattatgcttggaaaggctgagtggagatcaccaccagcattctctgcctgtggggctgtgggactgtggggctggtgcttcctccatttctgagggtctgagaatggcccagcatgcattaacacaggagagcgcagagcgcagcagggcctgctctcattgccctctattcccagccctgtcttcctcttccgtccgcaagcagtataaatgccatgtgccctctgcacttagagtgagccttagcgtatcaaggggctttgacgtggctccccgtacttcctgaaagtattcactgacactgaagcgtcagagtctagtgtaaccttaaggtaggttgtaaataacagttggctgtaggcatggtaagtctgagcagcccatccttagtgtggtgggaaggtctgtaccctgacctgctccacggtagatggtgtatgtaaattagaggtttcgatggaacaggatgagagctcaaggttctttgtttggtattatttgtgttaatgtgtcttgaatctgccaatctgtatgttaaaacagctgacagattgtaaagctattgccctggacaagtctgaaattagtgtaaaagaaaacctcatcgttaactgcagccgctgtcagggtaccatatattcctggaacaagtctatggggaagagatgttctgcagacaaagggacggatgcctatggtagaggtcagagttggttacctgccttagttacaagtgttacgttctgggtctttgtaatcactgatctctgtaacagagcctctgtttattcttgcttgttggaaataagcttaaaccatgcatagttagaattactatgcttctgtctacacaggaagtgctgtagctctcaagtgctctagaggccattggttggagaggaaggaatgcatgcttatgttatgtaagcaactggactcccgctcagtacaggcctggagctccaggccgagtgcatactctgctgctttgagtgctgcaggagtgcccactggcctggctgtgaggctgatagctttttcaagtgcaggctgcaggattaagccaactcttatgcaactgactgtccttaatgatgatctcataaacatttgtgtgtgggggtgggagggtttgggtgtcgggatggggaatgaatttgaagtctaaagttaaagctagaaatcagatgatcagcttctgctctgtctatatagacgattggatttatgtggaggcaggccagatggcaactgatgacttgtgtgcaaacaagcatttatccaggttgcaatatccaaattggtttgttaaaaactctaggtcacattcttacactaagaaaaacagtaaacatgagacaaagtttaggaaaaactaataaaagaaacctgtcttaacttgaaa

SEQ ID NO: 91 - protein, 443 aa, Rattus norvegicus
  Signalosome subunit 2
MSDMEDDFMCDDEEDYDLEYSEDSNSEPNVDLENQYYNSKALKEDDPKAALSSFQKVLELEGEKGEWGFKALKQMIKINFKLTNFPEMMNRYKQLLTYIRSAVTRNYSEKSINSILDYISTSKQMDLLQEFYETTLEALKDAKNDRLWFKTNTKLGKLYLEREEYGKLQKILRQLHQSCQTDDGEDDLKKGTQLLEIYALEIQMYTAQKNNKKLKALYEQSLHIKSAIPHPLIMGVIRECGGKMHLREGEFEKAHTDFFEAFKNYDESGSPRRTTCLKYLVLANMLMKSGINPFDSQEAKPYKNDPEILAMTNLVSAYQNNDITEFEKILKTNHSNIMDDPFIREHIEELLRNIRTQVLIKLIKPYTRIHIPFISKELNIDVADVESLLVQCILDNTIHGRIDQVNQLLELDHQKRGGARYTALDKWTNQLNSLNQAVVSKLA

SEQ ID NO: 92 - DNA, 1929 bp, Rattus norvegicus
  Signalosome subunit 2
gcacgagctgacatggaggatgatttcatgtgcgatgatgaggaggactacgacctggagtactctgaagacagtaactctgagcccaatgtggatttggaaaatcagtactataattccaaagcactgaaagaagatgacccaaaagcagcattaagcagcttccaaaaggttttggagcttgaaggtgagaagggagaatggggattcaaagcgctaaaacagatgatcaagattaacttcaagttgacaaactttccagaaatgatgaacagatataagcaactattgacctatattcggagtgcagtcaccaggaactattctgaaaagtccattaattctatccttgattatatctccacttctaaacagatggatttactgcaggaattttatgaaacaacactggaagctttgaaagatgctaagaatgatagactgtggtttaagacaaacacaaagcttggaaaattatatttagaacgagaagaatatggaaagcttcaaaaaattttacgacagttacatcagtcttgtcagactgatgatggagaagatgacctgaaaaaaggtacccagttattagaaatctatgctttggaaattcaaatgtacactgcacagaagaacaacaaaaagcttaaagcactctatgagcaatcacttcacatcaagtctgccatccctcacccactaatcatgggtgtcatcagagaatgcggtggtaagatgcacttgagagaaggtgaatttgaaaaggcacacactgatttttttgaagccttcaagaattatgatgaatcaggaagcccaagacgaaccacttgtttaaaatatttggttttagcaaatatgctaatgaaatcaggaataaatccgtttgactcacaagaggccaagccgtataaaaatgatccagaaattctagcaatgacaaatttagtaagtgcctatcagaataatgacatcactgaatttgaaaagattctgaaaacaaatcacagcaacatcatggatgatcctttcataagagagcacattgaagaacttttacgaaacatcagaacacaagtcctcataaagttaattaagccttacacaagaatacatattccttttatttctaaggagctaaacatagacgtagctgatgtggagagcttgctggtgcagtgcatactggataacactattcatggccgaattgatcaagtcaaccagctccttgaactggatcatcagaagaggggtggtgcccgatacactgcgctagataaatggaccaaccaactaaattctctgaaccaggctgtggtcagtaaactggcttaacggagaccgagctttgcggacatgcttaaggcaacagtgcagagatgtgacccttgaggactggaaagacaaagctccagtgggttggtgtgtcctgaaagggatggagttatggcagaagtgcttttgtgatcaactggtttgtggtttgctgctgcatttatcccaagaaaacagctttaatctccagaagaaaaccaaaacaccatgggatttatgctgtgttgacatcttgccctaaacatacaacaccatagtaatttgtcatgggcgacatgatcagagagaagatttttgtcatgattttaaaaacactgacacgctactgttggttaaatttaaacatgttgtacctgcagaaattctctcacaaataacctgcaataacttgaaattcatacccttttgaacacttccttttctcatgtataaatgaaaatgtttgctgcattttgcaaaatgtcaattctccaaaactgtgtccgtctatttctgttcttgcagctagtaaaggttagacaacccgaattctcagtggcacgctgtcacctagggctcaagcagcaaaataaacagtgcagctcagaaattaaa

SEQ ID NO: 93 - protein, 777 aa, Rattus norvegicus
  rS-Rex-s
MAAPPDLQDEPLSPANPGSQLFGGRGEGEEATPKGARPAQQDGEPAWGSGAGAGVVSSRGLCSGPARSPPVAMETASTGVAAVPDALDHSSSPTLKDGEGACYTSLISDICYPPREDSAYFTGILQKENGHITTSESPEELGTPGPSLPEVPGTEPHGLLSSDSGIEMTPAESTEVNKILADPLDQMKAEACKYIDITRPQEAKGQEEQSPGLEDKDLDFKDKDSEVSTKPEGVHAPNQPSPVEGKLIKDNLFEESTFAPYIDELSDEQHRMSLVTAPVKITLTEIGPPVMTATHETIPEKQDLCLKPSPDTVPTVTVSEPEDDSPGSVTPPSSGTEPSAAESQGKGSVSEDELIAAIKEAKGLSYETTESPRPVGQAADRPKVKARSGLPTIPSSLDQEASSAESGDSEIELVSEDPMASEDALPSGYVSFGHVSGPPPSPASPSIQYSILREEREAELDSELIIESCDASSASEESPKREQDSPPMKPGVLDAIREETSSRATEERAPSHQGPVEPDPILSFTPVTLQSRPEPSSGDGAPVPEPPKSQQQKPEEEAVSSSQSPAATEIPGPLGSDLVPPLPFFNKQKAIDLLYWRDIKQTGIVFGSFLLLLFSLTQFSVVSVVAYLALAALSATISFRIYKSVLQAVQKTDEGHPFKAYLELEITLSQEQIQKYTDCLQLYVNSTLKELRRLFLVQDLVDSLKFAVLMWLLTYVGALFNGLTLLLMAVVSMFTLPVVYVKHQAQVDQYLGLVRTHINTVVAKIQAKIPGAKRHAE

SEQ ID NO: 94 - DNA, 1502 bp, Rattus norvegicus
  rS-Rex-s
gcgagtctgcagccgcgcggccaccagagcccaccgccgccgcagccgggcagcgacgcagagtgcaagctcagcgactggaggagagccacggcgagcccgccaagcccgcaccatgcaggccactgccgattccaccaagatggactgtgtgtggagcaactggaaaagtcaggctattgaccttctgtactggcgggacatcaagcagacggggattgtgttcgggagcttcctgctgctgctcttctccctgacccagttcagcgttgtgagcgtcgtcgcctacctggccctggctgccctctctgccaccatcagcttccgcatctacaagtccgttctacaagctgtgcagaaaacagatgagggtcaccctttcaaggcctacctggagctggagatcaccctgtcccaggagcagatccagaagtacacagactgcctgcagctatacgtgaacagcactctgaaggagctacggaggctcttcctggtccaggacctggtggattccttaaaatttgcagtcctcatgtggctcctgacctacgttggcgcactcttcaatggcctgaccctgctgcttatggctgtggtttcgatgtttactctacctgtggtatatgttaagcaccaggcacaggttgaccaatatctgggacttgtgaggactcacataaacaccgttgtggcaaagatccaggctaaaatccccggcgccaagaggcacgctgagtagatggttgccccaggagaagccggacatgaatgggggtgtctggagtggtaacagctctctccttcctcgttactgcgaattgattgtttcccttccccagtaccataatcttagaggcaaacttcgagacaggtgttttcaggcttttcctgtactcttaggatatttgagtccccccgccccttgtcaagcactaaagtatagagtgtgttagatgtggtttttaattttgtgttgctaaaaaaaaaagtgcatgatggtgagagctcacgttctccttcgtcccttgctgtcctccccctgcaatgcttctgtggcttctactgtccctgtggctaggcccttcttgccaagtgcgctgacacatagtgggtcgcttatcatgtccttgggttgctggttggattcatctctaataacactatatagaatcataggccaatgttttcgcattttacccccccacacacagaacataaaaattaatataaaaccgttgaccgtgtatatggtcgagccgttttgtataagctaagaatgatcgaattaaagaataactccaaaaatcgaccgcacagtacttttattgtatgggatgccctgggctgatttacatgtatggtaactaaagtgccagcatgttgactttattacgatttgtatttcttcctctgtagttcctaacggactcaatcacagactctgggtatttgcacttatgtacttgatactgaatgcatcaataaatgtgactcaatgt

SEQ ID NO: 95 - DNA, 212 bp, Rattus norvegicus
  Haemoglobin beta chain
aggctgctggttgtctacccttggacccagaggtactttgatagctttggggacctgtcctctgcctctgctatcatgggtaaccctaaggtgaaggcccatggcaagaaggtgataaacgccttcaatgatggcctgaaacacttggacaacctcaagggcacctttgctcatctgagtgaactccactgtaagggcctgcatgtggatcc

SEQ ID NO: 96 - DNA, 433 bp, Rattus norvegicus
  PMSG-induced ovarian mRNA
  misc_feature 377: n is a or g or c or t
acaaaaaactgtttattgctgtgacagccaccagaagctgtcaaggagcccattgctgtgaggggccaggcagccagtggatgggctgaacgccagtctcacgagtcaaccaacctgctgctggccccgcccacccagcaataggctgtcacactgattaaaacccaaccaggagataggaaacccccataggttcaccttcctaggtctcatgacctagacgaagaagagtgccccaaatacccctccaaaataagacctgccctggtccctcatatttctgaggatcctggggtgtcatacagccctgcagcaagccagagttgcagccccaaggaagtaccagctcctctctgttccacaggctgtcccaagantccagcccaaggtattcagctgcctctagaatgcagggggggaatcactaggaata

SEQ ID NO: 97 - protein, 1230 aa, Rattus norvegicus; identical to SEQ ID NO: 44
  TBP-interacting protein

SEQ ID NO: 98 - DNA, 4383 bp, Rattus norvegicus; identical to SEQ ID NO: 45
  TBP-interacting protein

SEQ ID NO: 99 - protein, 625 aa, Rattus norvegicus
  CRM1 protein
DTDSINLYKNMRETLVYLTHLDYVDTEIIMTKKLQNQVNGTEWSWKNLNTLCWAIGSISGAMHEEDEKRFLVTVIKDLLGLCEQKRGKDNKAIIASNIMYIVGQYPRFLRAHWKFLKTVVNKLFEFMHETHDGVQDMACDTFIKIAQKCRRHFVQVQVGEVMPFIDEILNNINTIICDLQPQQVHTFYEAVGYMIGAQTDQTVQEHLIEKYMLLPNQVWDSIIQQATKNVDILKDPETVKQLGSILKTNVRACKAVGHPFVIQLGRIYLDMLNVYKCLSENISAAIQANGEMVTKQPLIRSMRTVKRETLKLISGWVSRSNDPQMVAENFVPPLLDAVLIDYQRNVPAAREPEVLSTMAIIVNKLGGHITAEIPQIFDAVFECTLNMINKDFEEYPEHRTNFFLLLQAVNSHCFPAFLAIPPAQFKLVLDSIIWAFKHTMRNVADTGLQILFTLLQNVAQEEAAAQSFYQTYFCDILQHIFSVVTDTSHTAGLTMHASILAYMFNLVEEGKISTPLNPGSPVSNQMFIQDYVANLLKSAFPHLQDAQVKLFVTGLFSLNQDIPAFKEHLRDFLVQIKEFAGEDTSDLFLEERETALRQAQEEKHKLQMSVPGILNPHEIPEEMCD

SEQ ID NO: 100 - DNA, 2099 bp, Rattus norvegicus
  CRM1 protein
gatactgattccataaatttgtataagaatatgagagaaacattagtttatcttacccatctggattatgtagatacggaaataataatgactaagaaacttcaaaatcaagtgaatggtacagaatggtcatggaaaaatttgaatacactgtgctgggcaataggctccatcagtggggcgatgcacgaggaggatgagaagcggttccttgtcactgttatcaaggacctcttaggattatgtgagcagaagagaggcaaggataataaagccatcattgcatcgaatatcatgtacatagtaggccagtacccacggtttctgagagcacactggaaatttttgaagacagtagtaaacaagcttttcgaattcatgcatgaaacccatgatggagtccaggacatggcttgtgacacatttattaaaatagctcaaaaatgccgtagacattttgttcaggttcaagttggagaagtaatgccgtttattgatgagattttaaacaacataaatactataatttgtgatcttcagcctcagcaggttcataccttttatgaagcagtggggtacatgattggtgcacagacagaccagacagttcaagagcatttgatagaaaaatacatgctactccctaatcaagtatgggacagtataattcaacaggcaaccaaaaatgtggatatcctgaaagaccccgagacagtcaagcagctggggagcatactaaaaactaatgtgagagcctgcaaggctgttggccacccctttgtgattcagctggggaggatttacttagacatgctcaatgtgtacaagtgcctcagtgaaaacatttctgcagccattcaagctaacggtgagatggttacaaagcaaccactgattagaagtatgcgaacagtaaaaagggaaactttaaagttaatatctggttgggtgagccgttccaatgatcctcagatggtagctgaaaactttgttcctcctctgttggatgcggttcttattgattaccagagaaatgttccagctgctagagagccagaagtgctcagtactatggccattattgtcaacaagctcggtggacatataacagctgaaatacctcagatttttgatgcagtttttgagtgcacattgaatatgataaataaggattttgaagagtatccagaacacagaaccaactttttcttgttacttcaagctgtcaattctcactgtttcccagcattccttgctattccacctgcccagttcaagcttgttttggattctattatttgggcttttaaacatactatgaggaatgtcgcagatacaggcttacagatactttttacacttttacaaaatgttgcacaagaagaagctgcagcgcagagtttttaccaaacgtacttttgtgacattcttcagcatatcttttctgttgtgacagacacctcacatactgcgggtctaacaatgcatgcatcaattctcgcatatatgtttaatttggttgaagaaggaaagataagcacaccgctaaatcccggaagtccagttagcaaccagatgtttattcaagactacgtggctaatctccttaagtctgcgttccctcacctacaagatgctcaagtaaagctctttgtgacaggacttttcagcttaaatcaagatattcctgctttcaaagaacatctaagggatttcttagttcaaataaaggagtttgcaggtgaagacacatcggatctatttttggaagagagagaaacagctcttcgacaggctcaggaggagaaacataaacttcaaatgtctgtacctggaatccttaacccacatgaaatcccagaagaaatgtgtgactaaatctgaagtcccgaagccccgctaggctcttttccctgtgcagcgtttgtcctgggagagcagcagatgggttctctgtcgaccaaaatgatgccaatttgtaaattaaaatgtcacctagtgaaaaaaaaaaaaaaaaaaaaaaaaaaaaaaaaaaaaaaaaaaaaaaaaaaaaaaaaaaaaaaaaaaaaaaaaaaaaaaaaaaaaaaaaaaaaaaaaaa

SEQ ID NO: 101 - DNA, 1029 bp, Mus musculus
  SGC10
ggaaaacaccacctgggttatttcaggccgaacatgtccagcaacagctaaggtggctctgtgagttcttgggaccacatgcactgacccctctgcccttgctctttctaggagaggcatgctgcagaggttcgcaggaacaaggaactgcaggttgaactgtctggctgaagcaatggcgtgtatggcaagccctcccatagtaaatccccctgcctatattataatggatcatgcgatatcagtatgggaagtgtatgacatggtttaaaaagaactcattatgaaaaacaaaacaaaaaacagaatcaaaaataaaataaaaatcaatgcggtctctttgcagaatgttttgcttgatgtttaaaaaagtaccttggatcttattttgcaaatatttacatttttgttaaaaaatacaagtattgcattatgcaagttatttcatgatcttacatgtcctgtaacaggcttttgacgttgtgtctttccactcagatggatttgctaggtctgttctcttttggaagccccactcagtccctgcccttttcattccaaccgaaaaatgaggtcagtagacagtctatggtgctagaaacccaccattgcctaatgacctagatgactccgtaatctctgagcgtgaccaagaccacacctagatcgtgggtactgtgtgtccatgtgaacctccacatttgctcgtaatctgcttcctgcctagaagcgcaaagccaggctaagggaatctaccagtcatagcacttatgtctgctcctcatggattacgcgctacacatgtgtttgggttttagaaacaggtgcatgtgaagacaaatctgagctcagtcagggtagaagcgaaaggctgaaccttccaacgtgctgatcacaaacgcaaagccagagggttcaagcagccatgggattgttcttcatgaagtgggcttatttctctcattttagttattatgatgggatgaattaattgacatgtcgggtggcttatctgtgggtgccatgggt

SEQ ID NO: 102 - protein, 892 aa, Rattus norvegicus
  Myosin heavy chain
PPGCRNSARGKLEGDLKLAQESTMDVENDKQQLDEKLKKKEFEMSNLQSKIEDEQALGMQLQKKIKELQARIEELEEEIEAERASRAKAEKQRSDLSRELEEISERLEEAGGATSAQIEMNKKREAEFQKMRRDLEEATLQHEATAATLRKKHADSVAELGEQIDNLQRVKQKLEKEKSEMKMEIDDLASNMEVISKSKGNLEKMCRTLEDQVSELKTKEEEQQRLINELTAQRGRLQTESGEYSRQLDEKDSLVSQLSRGKQAFTQQIEELKRQLEEEVKAKSALAHALQSSRHDCDLLREQYEEEQEAKAELQRAMSKANSEVAQWRTKYETDAIQRTEELEEAKKKLAQRLQDAEEHVEAVNAKCASLEKTKQRLQNEVEDLMIDVERTNAACAALDKKQRNFDKILAEWKQKYEETHAELEASQKESRSLSTELFKIKNAYEESLDQLETLKRENKNLQQEISDLTEQIAEGGKRIHELEKIKKQIEQEKSELQAALEEAEASLEHEEGKILRIQLELNQVKSEIDRKIAEKDEEIDQLKRNHIRVVESMQSTLDAEIRSRNDAIRIKKKMEGDLNEMEIQLNHSNRMAAEALRNYRNTQGILKDTQLHLDDALRGQEDLKEQLAMVERRANLLQAEIEELRATLEQTERSRKIAEQELLDASERVQLLHTQNTSLINTKKKLETDISQIQGEMEDIVQEARNAEEKAKKAITDAAMMAEELKKEQDTSAHLERMKKNLEQTVKDLQHRLDEAEQLALKGGKKQIQKLEARVRELEGEVENEQKRNVEAIKGLRKHERRVKELTYQTEEDRKNVLRLQDLVDKLQSKVKAYKRQAEEAEEQSNVNLAKFRKIQHELEEAEERADIAESQVNKLRVKSREVHTKIISEE

SEQ ID NO: 103 - DNA, 2924 bp, Rattus norvegicus
  Myosin heavy chain
cccccgggctgcaggaattcggcacgagggaaactcgagggggacctaaaactggcccaagagtccacaatggacgtagaaaatgacaaacagcagctcgatgagaaactcaaaaagaaagagtttgaaatgagcaacctgcagagcaagatcgaggatgaacaggccctcggcatgcagctgcagaagaagatcaaggagttgcaggctcgcattgaggagctggaggaggaaatcgaggcagagcgggcctccagggccaaagcagagaagcagcgctctgacctctcccgggaactggaggagatcagcgagcggctggaagaagccggcggggccacttcagcccagatcgagatgaacaagaagagagaggccgagttccagaaaatgcgcagggacctggaggaggccaccctgcagcacgaagccacagcagccaccctgaggaagaagcacgcggacagcgtggctgagctcggggagcagatcgacaacctgcagcgggtgaagcagaagctggagaaggagaagagcgagatgaagatggagatcgacgacctcgctagcaacatggaggtcatttccaaatccaagggaaaccttgagaagatgtgccgcactctggaggaccaggtgagcgagctgaagaccaaggaggaggagcagcagcggctcatcaatgagctgaccgcgcagagggggcgtctgcagacagagtcaggtgaatattcacgccagctggatgaaaaggattcattagtttctcagctctccaggggcaaacaggcattcactcaacagattgaggagctgaagaggcagcttgaagaggaagtaaaggccaagagtgccctggctcatgctcttcagtcctcccgccatgactgtgaccttctgcgggaacagtatgaagaagaacaggaagccaaggctgaactgcagagggccatgtccaaggccaacagtgaagtggcccagtggaggacgaaatatgagacggatgccatccagcgcacggaagaactggaggaggccaagaagaagctggctcagcgtctgcaggatgctgaggagcacgtagaagccgtgaacgccaagtgtgcttccctggagaagacgaagcagaggctgcagaatgaggtggaggacctcatgattgatgtggagaggaccaacgctgcctgtgccgccctggacaagaagcagagaaacttcgacaagatcctggcagaatggaaacagaagtatgaggaaacgcatgctgaacttgaagcctcccagaaggagtcccgctctctcagcacagagttgttcaagattaagaatgcttatgaggaatctttagaccaacttgaaaccttgaaaagggaaaataagaatttgcaacaggagatctctgacctcactgaacagattgcagaaggagggaaacgtatccatgaactggaaaaaataaagaagcaaattgagcaagaaaaatccgagctccaggctgctttagaggaagcagaggcatctctggagcacgaggagggaaagatcctgcgcatccagctggagctgaaccaagtcaagtctgagatcgacaggaagattgctgagaaggatgaggaaattgaccagctgaagagaaaccacattcgagtcgtggagtccatgcagagcacgctggatgccgagatcaggagcaggaatgacgccatcaggatcaagaagaagatggagggagacctcaatgagatggaaatccagctgaaccactccaaccgcatggctgctgaggccctgagaaactacaggaacacccaaggcatcctcaaggacacccagttgcacctggatgacgctctccggggccaggaggacctgaaggagcagctggccatggtggagcgcagagccaacctgctgcaggctgagatcgaggagctgcgggccactctggagcagactgagaggagcaggaagattgcagagcaggagctgctggacgccagtgagcgcgtgcagctcctccacacccagaacaccagcctcatcaacaccaagaagaagctggagacagacatttcccagatccagggagagatggaggacatcgtccaggaagcccgcaatgcagaagagaaggccaagaaagccatcactgacgccgccatgatggcggaggagctgaagaaggagcaggacaccagcgcccatctggagcggatgaagaagaacctggagcagacggtgaaggacctgcagcaccgtctggacgaggctgagcagctggcgctgaagggcggcaagaagcagatccagaaactggaggccagggtccgtgaacttgaaggagaagttgaaaacgaacagaagcgcaatgttgaagctatcaagggtctgcgcaaacatgagagaagagtgaaagaactcacttaccaaactgaggaagaccgcaagaacgttctcaggctccaggaccttgtggacaaactgcaatcaaaggtcaaagcatacaagagacaagccgaggaagcggaggaacaatccaacgtcaacctggccaagttccgcaagatccagcacgagctggaggaagccgaggagcgggctgacatcgccgagtcccaggtcaacaagctgcgggtgaagagccgcgaggttcacaccaaaatcataagcgaagagtgatcgatccaaagcaggaaagtgaccaaagagatgagcaaaatgtgaagatctttgtcactccattttgtacttacgactttgggagataaaaaatttatctgccaaaaaaaaaaaaaaaaaaaaaaaaaaaaaaaaaaaaaaaaaaaaaaaaaaaaaaaaaaaaaaaaaaaaaaaaaaaaaaaaaaaaaaaaaaaaaaaaaaaaaaaaaaaaaaaaaaaaaaaaaaaactcgagggggggcccggt

SEQ ID NO: 104 - protein, 428 aa, Rattus norvegicus
  KIAA 1157
GKSTHNEDQASCEVLTVKKKAGAVTSTPNRNSSKRRSSLPNGEGLQLKENSESEGVSCHYWSLFDGHAGSGAAVVASRLLQHHITEQLQDIVDILKNSAVLPPTCLGEEPENTPANSRTLTRAASLRGGVGAPGSPSTPPTRFFTEKKIPHECLVIGALESAFKEMDLQIERERSSYNISGGCTALIVICLLGKLYVANAGDSRAIIIRNGEIIPMSSEFTPETERQRLQYLAFMQPHLLGNEFTHLEFPRRVQRKELGKKMLYRDFNMTGWAYKTIEDEDLKFPLIYGEGKKARVMATIGVTRGLGDHDLKVHDSNIYIKPFLSSAPEVRIYDLSKYDHGSDDVLILATDGLWDVLSNEEVAEAITQFLPNCDPDDPHRYTLAAQDLVMRARGVLKDRGWRISNDRLGSGDDISVYVIPLIHGNKLS

SEQ ID NO: 105 - DNA, 5791 bp, Rattus norvegicus
  KIAA 1157
gggaagagcacacacaatgaagaccaagccagctgtgaggtgctcactgtgaagaagaaggcaggggccgtgacctcaaccccaaacaggaactcatccaagagacggtcctcccttcccaatggggaagggctgcagctgaaggagaactcggaatccgagggtgtttcctgccactattggtcgctgtttgacgggcacgcggggtccggggccgcggtggtggcgtcacgcctgctgcagcaccacatcacggagcagctgcaggacatcgtggacatcctgaagaactccgccgtcctgccccctacctgcctgggggaggagcctgagaacacgcccgccaacagccggactctgacccgggcagcctccctgcgcggaggggtgggggccccgggctcccccagcacgccccccacacgcttctttaccgagaagaagattccccatgagtgcctggtcatcggagcgcttgaaagtgcattcaaggaaatggacctacagatagaacgagagaggagttcatataatatatctggtggctgcacggccctcattgtgatttgccttttggggaagctgtatgttgcaaatgctggggatagcagggccataatcatcagaaatggagaaattatccccatgtcttcagaatttacccccgagacggagcgccagcgacttcagtacctggcattcatgcagcctcacttgctgggaaatgagttcacacatttggagtttccaaggagagtacagagaaaggagcttggaaagaagatgctctacagggactttaatatgacaggctgggcatacaaaaccattgaggatgaggacttgaagttcccccttatatatggagaaggcaagaaggcccgggtaatggcaactattggagtgaccaggggacttggggaccatgacctgaaggtgcatgactccaacatctacattaaaccattcctgtcttcagctccagaggtaagaatctacgatctttcaaaatatgatcatggatcagatgatgtgctgatcttggccactgatggactctgggacgttttatcaaatgaagaagtagcagaagcaatcactcagtttcttcctaactgtgatccagatgatcctcacaggtacacactggcagctcaggacctggtgatgcgtgcccggggtgtgctgaaggacagaggatggcggatatctaatgaccgactgggctcaggagacgacatttctgtatatgtcattcctttaatacatggaaacaagctgtcatgaaaatggcccaggggattgggaggacagaggggaagaaagctgggatgcctcttggcaggacggaactgggaagtgccccagctgagttccaagtgatgcagtctcttcccagcccaagcggggagttcatggccaaaagactatgcttcaagatgaccctttggtttccatttcttctttagtaacaggtcaactcaacaagagcaaaacacaaaggctgctaccaagtgttgttgtatttcagttcctttcataggcctccgaggtggccattgactatttggggtatatatgtcatatttattttatctagagtagctggggcagccattttcaggtgtaaatggcagaggactcttcagcctgtcaagctgccagcttatctacgggttaaaaagtgctgcattggaaagtagggggtcatgcctcaaaatgtaagtaagtgcccaccttctaggaagcctgaggtttatttcagggattgccgtctgccccccgccccccttctctttttttcttctctgtttctattcttttatggcagtggtggagtgaggcagggattttttttttttttttttcgtgtttttgacattccttgaatctgttttttattccccttccacagaacaggcctgggactttccaacaccctgctaaggaagttctgtgtccaagtcccacccaggctgggttgtccccacctcctccagcccacacagcccaggcagcatccgggccagtgccctgcatgacagagggtctttgttgtgtaatgtttgttcccaagttgcattttctaaccgaatcagtgtgttttcatgaaactgagtgtttctgtggaccagtagttcctctgttgtcttcagtggtcttcctgtgtggctcaagggttctctgtgagagtctggattttcatttctggaatggctggccccatcccacttttctgtatcatggggacacatataaagcagtgtttaatagagcagtttaagaagttgcttgcatctgttggttcaccatggctcatctggggaccattttggattcatgtttcatggcttgtgactgtccccaagcccactccaaacaaagtgtaaggatcagagttctgtcaaggagcagcagttctgctctccccatcatctttgtgcaaggcccctcggggggcactttaataaaagaatttgaaatgggttgactggccattctcatgctgtgctccctgtctcttctcttctctaaagaatcatgtcccagctcctcaaggtccctctatggttccacatctgagtgttcgccacaagagcagcagcagcaggcacagtgcatgccatatctacctgctgcttctctgctgggaggaatggccaagtagattataaaactcacttctgtctcttaggcagacttgtacggccacaaaattacctagtcttcttcctgctgagctactgaggtattgccaccattttgacaactttgagtaattaaaacactcttctgacccaaaaaggaaaaaaggtcactgacgtgacccccccagcatgctagagagctaattccagttctcatatttgtttgaatttcttcccagaggagaggataggaacctctcctccagggcagtaaatcacctgcatttctggagttgtcggtattgtattcgaaaaggcctggagcccctcctgctcaggaaagaactcattccagggtgtggagacagtgccgtctggcaggtgaaatactgtgggaattcacgccaccaggtgtttgtgcaagtgttggcctgggaagaatgggacttcggccttgtcaggagttgtcttcatctgcagcacgtttcttcctcctgcagtagatcttagctaccccagatatctctatggagagaagtttgtggaaaatgctttgcttcgtggcagagtctgatgctgtaggaaaaccttcgggcatgtgacagcagtgtggtccactccctgttctgccctggcgctcagagtcatgtgtaagtaggaaacctgagcaagtcttccgtggaggaccctgagctgccgtctttgggatccttcctgtgtccccaccgtctttcatttatttgctttcctgggcctctatctgggccctaccttgagcttctccagttttattcaagccaccagagtaagaatttgggtgtagatgtcacaactaccttctactcaattcaccaattcatttactgctatggcacgtctcaggaataactctagaaacctctaaatcgaaatattataaaatcttgagcacttagtcctgctggttttagttagaaaggcatccaggaattgttttcctacgcccccttgagtggaaagatcttagttagaagataaagtcaagtttgtgttcaggggatgggaggaagactataaataagatgaagaaatcaaaagtaggaaacatgatgtaaacgaagcatggcagatctgtccagcactgatattgctctataaattgagcttactcagttttggccttatttttttacccaggccccatgtcacccagtcctaaaacagtaaccgtgtctacataacgggttggcccctggtgcatccctggaaaagtcaaaggacgcacacttcgaaattctgcagaacgtatttatacatggttcagaaatcttgcgtatctgacttatagccaaatctgcttgctcgaatagcctcagaggaagtcttgtttaataaaaaccttttgatttcctagtcaagtctttatggttgtctcgaggggtgtgtggctactttaatgaaaggctttcctgctctaaatctctttgctgggctgggcctcttcagactatctggtgaaactcctttccttagaacaaactcagtccgtccatgctctgtggcattttgctagatgataaccaaagccttattcctgtagccagtgtcagcagtcagagaggtggagggtgtgttctgctgtggttatgcatacctatctgctgttcttgaggtgtaaaaggaaaggtgaaaatcgggccaggccaagtactcagctgtcttaataggatgaagccttaagcagtggaaatttcagttattttccacagtattccattttggaggatttggggtgtttactttttaaattcttgaacaacttaacctccatgaggctttgtgaagtcagctgtgaccaccctcctcttactgtgttctcagtattcattcacttccagggaagaatgacagccacagggagatggtggtgggcaagaatgagagtcccaggatccagatttagcctcagatcttccccattcaggaagggttttccatttaacaagagcactagtatgaaaacattagggacaaatctcccatgtctttgaaattcggattctcctcttgagatccccttcctcacctgccaatcaactttataaggccacaagtggtcactggttttccttccacaggtttgaggttctcagctttccttaagcgacccagcagctccgctgttttcagagtgaatatgttaagctttgatgagattctattttcagtaagttagtgcttctgggacacttggagaaagctgtgagagtcattgtctacgcaaagaacaacgaagctgatcctaaaagtgatccaatctaagaaaatggtaaaacgagctctggccacagcacagaattttatgtgaggaactcagatttttgaagacttaacaattgcagagaaaggttgcagcctgcacaccatagcccacctctctgagcagactttggttttgtgtggtgacgtggcacatgtttgtacactgggatttttcaaaggacgctacgcgagcagactgacttgcctcttctgtgagcactgtggcttttgtcagatggagtgccggtctgcagaggactgctctttcgaatccacagtgttatctgtgtaaatagctttaatttttcttctgtgtcttaggtgaagttttgttcatgtagcaaccaggtagacagtgaccaaataaggctgtaaatgtgctgtagttttctactgtgatgtacttgaaggagaacctgtgtcctctacttttctgatctcccacaagtattttgtgtttgtttcctgagtcctgaggttattattttactcctgttttgcccccagttttctttgttttttttctggagacccagggaggcccatggtggagatcatttgtaaggaatggatcatggtctgggtttccaaaactaccctagtacagtgaatgagagaaatctgcctggaaattgtttcagaaccatgtacctttatgctttgtgattgtgaaacattgacttttttgtaaccccaaaatgaaaactgtttagtaaaggggatctattttgtgtgttttgaaacttaggtgcaatgtcccctggaaaaagctaaagaaatgtatatgttcaatgacattttaaaataaaatattatatatatgtatatacgacatattcagc

SEQ ID NO: 106 - protein, 1253 aa, Mus musculus
  SHYC
MAAQVTLEDALSNVDLLEELPLPDQQPCIEPPPSSLLYQPNFNTNFEDRNAFVTGIARYIEQATVHSSMNEMLEEGQEYAVMLYTWRSCSRAIPQVKCNEQPNRVEIYEKTVEVLEPEVTKLMNFMYFQRNAIERFCGEVRRLCHAERRKDFVSEAYLITLGKFINMFGVLDELKNMKCSVKNDHSAYKRAAQFLRKMADPQSIQESQNLSMFLANHNKITQSLQQQLEVISGYEELLADIVNLCVDYYENRMYLTPSEKHMLLKVMGFGLYLMDGSVSNIYKLDAKKRINLSKIDKYFKQLQVVPLFGDMQIELARYIKTSAHYEENKSRWTCASSSSSPQYNICEQMIQIREDHMRFISELARYSNSEVVTGSGRQEAQKTDAEYRKLFDLALQGLQLLSQWSAHAMEVYSWKLVHPTDKYSNKDCPDNAEEYERATRYNYTTEEKFALVEVIAMIKGLQVLMGRMESVFNHAIRHTVYAALQDFSQVTLREPLRQAIKKKKNVIQSVLQAIRKTVCDWETGHEPFNDPALRGEKDPKSGFDIKVPRRAVGPSSTQLYMVRTMLESLIADKSGSKKTLRSSLEGPTILDIEKFHRESFFYTHLINFSETLQQCCDLSQLWFREFFLELTMGRRIQFPIEMSMPWILTDHILETKEASMMEYVLYSLDLYNDSAHYALTKFNKQFLYDEIEAEVNLCFDQFVYKLADQIFAYYKVMAGSLLLDKRLRSECKNQGATIHLPPSNRYETLLKQRHVQLLGRSIDLNRLITQRVSAAMYKSLELAIGRFESEDLTSVVELDGLLEINRMTHKLLSRYLTLDSFDAMFREANHNVSAPYGRITLHVFWELNYDFLPNYCYNGSTNRFVRTVLPFSQEFQRDKQPNAQPQYLHGSKALNLAYSSIYGSYRNFVGPPHFQVICRLLGYQGIAVVMEELLKVVKSLLQGTILQYVKTLMEVMPKICRLPRHEYGSPGILEFFHHQLKDIAEYAELKTVCFQNLREVGNAVLFCLLIEQSLSLEEVCDLLHAAPFQNILPRIHVKEGERVDAKMKRLESKYAPLHLVPLIERLGTPQQIAIAREGHLLTKERLCCGLSMFEVILTRIRTFLDDPIWRGPLPSNGVMHVDECVEFHRLWSAMQFVYCIPVGTHEFTVEQCFGDGLHWAGCMIIVLLGQQRRFAVLDFCYHLLKVQKHDGKDEIIKNVPLKKMVERIRKFQILNDEIITILDKYLKSGDGETTPVEHVRCFQPPIHQSLASS

SEQ ID NO: 107 - DNA, 4112 bp, Mus musculus
  SHYC
ccgccctggacaaccgaagcggcgcagaccaggatggctgcccaagtgacactagaggacgcactgtccaatgtggacctcctggaggagctgcctctgcctgaccagcagccctgcatcgagcccccaccgtcctcgctgctctatcagccaaatttcaacaccaactttgaagacagaaatgcatttgtcactggcattgcaagatacatcgaacaagcaactgtccactctagcatgaacgagatgctagaggaaggccaagagtatgctgtcatgctgtacacctggaggagctgctcccgggccatccctcaggtgaagtgcaacgagcagccgaatagagttgaaatttatgagaaaaccgtggaagtccttgaacccgaggtcacaaaactgatgaattttatgtactttcagagaaatgccatcgagcggttctgtggggaagtgagacgcctgtgtcatgctgagaggagaaaggactttgtttctgaagcctacttgatcaccctgggcaaatttatcaacatgtttggtgtgttggatgagctgaagaacatgaagtgcagtgtgaagaatgaccactctgcatataagagggctgctcagtttttacgtaaaatggcagatccacaatccatccaggagtcacagaatctgtccatgttcctggccaaccacaacaagattacacaatctctgcagcagcagcttgaggtcatttctggctatgaagagctcctggcagacatcgtgaatctgtgtgtggattactatgagaacaggatgtacttgacacccagcgaaaaacacatgcttctcaaagtcatgggatttggcctgtacctgatggatgggagtgtgagtaacatctacaaactagatgccaagaaaagaataaatttatccaaaatcgacaagtatttcaagcagctgcaggtggttccactctttggagatatgcaaatagaactggcaagatacatcaagaccagcgcacactatgaggagaataagtcccggtggacctgcgcgtcctccagcagcagcccgcagtacaacatctgtgagcagatgatccagatccgtgaggaccatatgcgtttcatctccgagctggcacgctacagcaatagcgaggtagtcacagggtctggccggcaggaagcccagaagacagatgctgagtaccggaagctcttcgatctggctctgcagggcctgcagcttctgtcgcagtggagcgctcacgcgatggaagtgtattcctggaaacttgtacatccaacagacaagtactccaacaaggactgccccgacaacgctgaggagtacgagcgagccacacgctacaactacaccactgaggagaagtttgccctggtggaggtgattgccatgatcaaaggcctgcaggtgctgatgggcaggatggagagtgtgttcaatcacgccatcagacacacggtttacgctgcgcttcaggacttctcccaggtgaccctcagggaaccactgcgacaggccatcaagaagaaaaagaacgtaatccagagtgtcctacaggccatcaggaagactgtgtgtgactgggagactgggcatgagccctttaacgacccagctctgcggggagagaaggaccctaagagtggctttgacatcaaggtgccacgccgtgctgtgggaccctccagcacgcagctttacatggtgagaactatgctagagtccctcattgcagacaaaagtggttccaagaaaaccttgagaagtagccttgaggggcccaccatattggacatagaaaaatttcatcgagaatcattcttctacactcacttgataaatttcagtgaaacactgcagcagtgctgtgacctttcccagctgtggttccgagagttcttcctggagctgaccatgggcaggaggatccagttccccattgagatgtctatgccctggattctgactgaccacatcctagagaccaaggaggcatcaatgatggagtacgtcctctactccttggacctgtacaacgacagtgcccactatgcgctcaccaagttcaacaagcagtttctctatgatgagattgaggcagaggtgaatctgtgttttgaccaatttgtttataaactagcagaccagatatttgcatattacaaggttatggcaggaagtttgcttcttgacaaaaggttacggtcagaatgcaaaaatcagggagccacgatccacctccccccatctaaccgctatgagacgctgttgaagcaaaggcacgtgcagctgctcgggagatccattgatctcaaccgtctgattacacagcgcgtttcagcagccatgtacaaatctctagaactggcaattggacggtttgaaagtgaagatttaacatcagtagtcgagctagatggactcttagaaatcaaccgtatgacacacaagctgttgagcaggtacctcacactggacagctttgatgccatgttccgggaagccaaccacaacgtgtctgcaccttatggaagaattaccctccacgtcttctgggagctaaactatgacttcttgcccaactactgctataatggctctaccaaccggtttgttcggacagtattaccattttctcaggaatttcaaagagacaaacagcctaacgcacagccccagtatttgcatggatccaaggctttgaacctagcctactcaagcatttatggcagctaccggaactttgtggggcctccgcacttccaagtcatctgccggctacttggctaccagggcattgcagtagtcatggaagagctgctgaaggttgtcaagagcctgctgcaaggcacaatcctgcagtacgtgaaaactctgatggaagtgatgcccaagatctgccggcttccgcgacatgagtacggctctcctggcatcctggagttcttccaccaccagctgaaggacattgcggagtatgcagagctgaaaaccgtatgcttccagaacctgcgggaggtgggcaatgctgttctcttctgcctgcttattgagcaaagcctgtctttagaagaagtctgtgacctgttgcatgcagctcctttccagaatatcttacctcgaatccatgtaaaagagggggagagagttgatgccaaaatgaaaagactagaatccaagtatgccccactgcaccttgtcccactgattgaaaggctgggcaccccacagcaaattgcaattgcaagagaggggcacttgctaaccaaggagcgtctctgttgtggtctgtccatgtttgaagtcatcctgacacggatccggacctttctggatgatcccatctggcgtgggcccctacccagcaatggtgtcatgcacgtggatgagtgtgtggagtttcacagactatggagtgccatgcagtttgtttactgcattcctgtagggacacacgagtttacagtggagcagtgttttggagatgggctccactgggctggctgcatgatcattgtacttcttggacagcagcggcgctttgctgtgttggatttctgctatcatcttctcaaagttcagaaacatgatggcaaagatgagatcatcaaaaatgtgccattgaagaagatggtggagaggatccgcaagttccagattctcaacgatgaaatcatcactatcctggacaagtacttgaaatctggtgatggcgagacgacacctgtggagcatgtacgctgcttccagccacccatccaccagtccctagccagtagctgagggctaagctcacagcatcccagtaactgatggcatgtttgtctttatgtaaactatattgaaatttttaggggctattttccattatgtctgaacctacttttgatctgaaagcttaactttataaaatttacttatttttctatactaaaattgtatatgcctttggaattgggaagtctgagaatacggttactagttgttgccattacggtattaacaagtattttcatgccgaatattccagcagctattataatgctaaatcactcatctgtacgagcataaccactaattgtattaaaaaaaaataaaaa

SEQ ID NO: 108 - DNA, 3738 bp, Rattus norvegicus
  MAP-2
tgaatccttctcatctagcactgaagtaccatttaggcatgagctcttggcaggagtgggctctgagcaggtgtcatattcattctttacaaaccatagataaataatctcatcccccaactgtagtaattgttacaattttatataaaaaaaaagaatagtatatgcagaaaatgacctgaattccatccgcaacaagagcacatggctttacatggatacaattggacaattattttcgctctgctctgttttgcatggagtattattattattattatttttaaaattgcatttttacctttcatgtgcctgaaggctatccaatacattctgaaaggccttgttaaaaatccaagctgctcatttccctattctgtttatggttggaaagattaaaaactatccattgtcgcttactacaggttcaaggaaatcaaggagtctgagtgcaggaaggaaagagcatgtaagagacacattttttaaagtgttattttgtataaatgggaagaaagatgcaactaagttattgatgtttgggacctggatgattatatcagagtatgccgttccaataaattatttaactaaaagctagattaaagcatgtgagcggtgtttgaagaagtggtgtggaagtgcgtctcttaggattgatgcactttcgttaggatgggctcgagtctgattagaatgtcagttgattggctagatttgtgtccacacagtcagtttcatgcccccattccatctgtttgatacagtattatagatataaatatatatatatatttctctgtggccatttgtgatacttcctcatatacttgaatatgatacttctttattcacagtatctgtgtctcctgcaccctttggtgttgcaattttaggtatgtgaaagtagatgttagcagggttctctccctatttaaaaatacattttacaaagacaaagagtttgagcatgaagttgctttctgtaacaactcaaagctgtaaccctgttttagtgccagaatcaagtccttcctgtgatgctagaacattttatttttctttgcttccaccaacatggagtttgtggagtgggtccagttatgcataaaggggtttacagattgttggtctatggatttatctcatgtttaattactgaatagtttgggttttatccctctaattattcatgaaaccaatcccttactattcatttcttctctttctcttttcctttttccatttgctaaagttgaaagtaggaaaatagttttggatatcttttcttgttctccaaatagtatctgttcattaaataattctctgatagaagatatttggcttccttctcccaaagacctcttcaaaaatgagaaatacaacatattaagaatatatatatatatatatatatatatattctttgagacacagatatctaaatccatctctccaggattctacatgaacatggtatgattttttttattttatatacagtctcaacatcacaattcattaatttcatttacaaatcatactaagtgaataagcaagagtcaatggcccaaaagaagacaaagcattatcaaaccaagtggacttttcccttaacatttaatttgttctttttcttgttctcaggattggtagactgaatctgaagggttaaatgtaaaaagttggctaggtgttttatgtctttgaaacaagccaagccctgtctataaaggagacggtgaacatgaacaagacagagacgtacaggtgtgtctgagacagaaggcaagtggatgcgaaggcagagaggaaacaggtggcagtttagtgatccattgagtattatggccaatgtgacagccacatggaaagcttagcatcaaacgaagacattcttcacagctagtaggtacacacacagacacagacacagacacacacacacacacacacacacacacacacacacacacacagagagagagagagagagagacacacacacacacacagagagagagagagacacacacacacacagagagagagagagagagacagagagagagagagagacacacacacgtctttgtaaattgtttttttaatatataactttaaaactaccatgtaatggttgctttcactctggacaatccattccttacctactcttgaatgcacaagaaatggaagaaggaacgtctgtgtgtggagaaggccagtcctacagttttggtagacaaggattaaagttatctaggaaaaagagagttaatagatgatccgtgtggtttaaactatgtagaagtaatttcaacccagtttattataaaaattaaggctaagcaaaggtttttttaagtgttcaagttcattttcttacgatgtgtattcaaaataaaattatgtaagccccaagttaatagatctagcactaaaatatcatttttctaatgttaatacaattataatggatacaagtccttgttctatgtgaaaatgtgattcacacatgaatgtaaagtcaacacaagaaggacctgaattttttgtaccagacagagacagagaaatgcacaggctaaaattcacttccttatgggaatgtgggatggatcccaccttacctacttaagataatgactcaaattaagctttttggacaccacttttgtggggatacacatacgctgatctagaaatgaaaggcgcacagctacatttctagatccactaatgccagtttctctttggcttcagcctttgagaacctgttcaagaatacgtaagtatccagagctctgaagagttcgaaggccaactttttcagtgaactcacacactctgggtctcctgcaactgacaattgggtaccttgcaacaatgcgggaaggatccgagtttatgatgagtttcaaaggccgtgttcacttaggaactgactctctctggatctgcctgctgcgttccagcgagatgacgggctgaaatcccacccataggaagacacctgtgcaattccagctcagtttggctgaaggtaactaaagaagaaggtccagtaaatggaagaatagactacagctggccttctccacacacacacgcacacacacgcacgcacgcacacacacagatgtgggatagaagagagatcagcaccaaaatgtagcattatatcagtagtagtaaagaaataatataaatgtgaatgattctgacttagctgcatttatagttttcttctcatttttcatgccacagggggaaaaaaataaattatttatagtagaagtagcaaggcaaaagtagatttatcatttggaaaggcaaatttcaggcatttcttcaagactggtgtgctaaaattaatactgttgttgtgtttttacacctagaagttttagcctggacatgtagattgaggccaagtccctatgtaggaaaaagtttttttcaaaacccctaaaaaaatgccaatcatgaaagtccacttcaactttagcaaaaaaattcaacaaaaagtatactctgtatgctgggatcccaaggttccaacacaccatctttgggggggttctttcttctgataattctagagcctgttaccatagaaaggaatttcttcaatggctgattgtagttagttcatgtttttcaatcaatttgcaaatgtatttgttgctgtatagtgattgttttgcaaaataaaattgcttgtcatctaactac

SEQ ID NO: 109 - protein, 1726 aa, Rattus norvegicus
  Chromatin structure regulator
MSDFVESEAEESEEEYNHEGEVVPRVTKKFVEEEDDDEEEEEENLDDQDERGNLKDFINDDDDEEEGEEDEGSDSGDSEDDVGHKKRKRPSFDDRLEDDDFDLIEENLGVKVKRGQKYRRVKKMSDDDEDDEEEYGKEEHEKEAIAGEIFQDEEGEEGQEAVEAPMAPPDEEEEDDEESDIDDFIVDDDGQPLKKPKWRKKLPGYTDAALQEAQEIFGVDFDYDEFEKYNEYDEELEEDYEYEDDETEGEIRVRPKKTTKKRVSRRSIFEMYEPSELESSHLTDQDNEIRATDLPERFQLRSIPVKAAEDDELEEEADWIYRNAFATPTISLQDSCDYLDRGQPTSSFSRKGPSTVQKIKEALGFMRNQHFEVPFIAFYRKEYVEPELHINDLWRVWQWDEKWTQLRIRKENLTRLFEKMQAYQYEQISADPDKPLADGIRALDTTDMERLKDVQSMDELKDVYNHFLLYYGRDIPKMQNAAKASRKKLKRIKEDGDEEGEGEEAEDEEQRGPELKQASRRDMYTICQSAGLDGLAKKFGLTPEQFGENLRDSYQRHETEQFPAEPLELAKDYVCSQFPTPEAVLEGARYMVALQIAREPLVRQVLRQAFQERAKLNITPTKKGRKDVDEAHYAYSFKYLKNKPVKELRDDQFLKIGLAEDEGLLTIDISIDMKGVEGYGNDQTYFEEIKQFYYRDEFSHQVQEWNRQRTMAIERALQQFLYVQMAKELKNKLLAEARESVVKACSRKLYNWLRVAPYRPDQQVEEDDDFMDENQGKGIRVLGIAFSSARDHPVFCALVNGEGEVTDFLRLPHFTKRRTAWREEEREKKAQDIETLKKFLVNKKPHVVTIAGENRDAQMLTEDVKRIVHELDQGQQLSSIGVELVDNELAILYMNSKKSEAEFRDYPPVLRQAVSLARRIQDPLIEFAQVCSSDEDILCLKFHPLQEHVVKEELLNALYCEFINRVNEVGVDVNRAIAHPYSQALIQYVCGLGPRKGTHLLKILKQNNTRLESRTQLVTMCHMGPKVFMNCAGFLKIDTASLGDSTDSYIEVLDGSRVHPETYEWARKMAVDALEYDESAEDANPAGALEEILENPERLKDLDLDAFAEELERQGYGDKHITLYDIRAELSCRYKDLRTAYRSPNTEEIFNMLTKETPETFYIGKLIICNVTGIAHRRPQGESYDQAIRNDETGLWQCPFCQQDNFPELSEVWNHFDSGSCPGQAIGVKTRLDNGVTGFIPTKFLSDKVVKRPEERVKVGMTVHCRIMKIDIEKFSADLTCRTSDLMDRNNEWKLPKDTYYDFDAEAADHKQEEDMKRKQQRTTYIKRVIAHPSFHNINFKQAEKMMETMDQGDVIIRPSSKGENHLTVTWKVSAGIYQHVDVREEGKENAFSLGATLWINSEEFEDLDEIVARYVQPMASFARDLLNHKYYQDCSGGDRKKLEELLIKTKKEKPTFIPYFICACKELPGKFLLGYQPRGKPRIEYVTVTPEGFRYRGQIFPTVNGLFRWFKDHYQDPVPGITPSSSNRTRTPASINATPANINLADLTRAVNALPQNMTSQMFSAIAAVTGQGQNPNATPAQWASSQYGYGGSGGGSSAYHVFPTPAQQPVATPLMTPSYSYTTPSQPITTPQYHQLQASTTPQSTQAQPQPSSSSRQRQQQPKSNSHAAIDWGKMAEQWLQEKEAERRKQKQRLTPRPSPSPMIESTPMSIAGDATPLLDEMDR

SEQ ID NO: 110 - DNA, 5923 bp, Rattus norvegicus
  Chromatin structure regulator
ttaacgcagcagcggcgacggtggtggtggtggtggcggcggctgcggaggccttgcggtgggtccggactatccttttgcagtctcttgatcggcgactccattttcttcggtgggagcttagcgtagcggagaagcagcggccttcaagcagtcttcaaggaggctgtgagaagcagcaacaatgtctgattttgtggaaagtgaggccgaagagtcagaagaagaatacaatcatgaaggcgaggtggtacctagagtcaccaagaagtttgtggaagaggaggatgatgatgaggaggaggaagaggagaatctagatgatcaagatgagcgaggcaacctcaaagactttatcaatgacgatgatgatgaagaagaaggggaggaggatgagggcagcgactctggggactcagaagacgatgttggccacaagaagagaaaacgcccatcttttgatgaccgcctggaagatgatgattttgacctcattgaggagaatttgggtgttaaagtcaaacgaggacaaaaataccgacgtgtcaaaaaaatgtctgatgatgatgaagatgatgaagaggaatatggcaaagaggaacacgagaaggaggccattgcaggggaaatcttccaagatgaagaaggggaagaaggccaggaggctgtagaggcccccatggcccctcctgacgaggaggaggaagatgatgaggagtcagacattgacgatttcattgtggatgatgatggacagcctctgaaaaaacccaaatggcgaaaaaagctccctggatatacagatgcagccctgcaggaagcccaggagatcttcggtgtggactttgactatgatgaatttgagaaatacaatgaatacgatgaagaactggaagaagactatgagtacgaggatgatgagactgaaggtgagatccgagtgcgccccaagaagaccaccaagaaacgtgtgagtcgcaggagcatctttgagatgtacgagcctagtgagctggagagcagccacctcacagaccaggacaatgaaatccgagccactgacttgcctgagaggttccagctccgctccatcccagtcaaggcagctgaggatgatgagctagaagaggaagctgactggatctatagaaatgccttcgcaacaccgaccatctccctccaggacagctgtgattacctagaccgtgggcagccaactagtagcttcagtcgtaaagggcccagcacagttcagaagatcaaagaggccctgggcttcatgcggaatcagcattttgaggtgcctttcattgccttctaccgaaaggagtatgtggaacctgagctgcacatcaatgacctgtggagggtgtggcagtgggatgagaagtggactcagctgagaatccgcaaagagaacctaacacggctgtttgagaagatgcaggcttatcagtatgagcaaatctctgctgaccctgacaaacctcttgctgacggcatccgggctctagatactactgacatggagaggctcaaagatgttcagtcaatggatgaactgaaagacgtctacaaccatttcttactttactacgggcgtgacatccccaagatgcagaatgctgccaaggctagccggaagaagctgaaacgcataaaggaggatggcgatgaagaaggtgaaggtgaggaggctgaagatgaggaacagaggggaccagagctcaagcaagcctcccgccgagacatgtataccatctgccagagtgccgggctagatggcctggccaaaaagtttggcctcacacctgagcagtttggggagaacctccgtgacagctaccagcgccacgagacagagcagttccctgcagagcctttggagctggccaaagattacgtgtgcagccagttccctacaccagaagctgtgcttgaaggtgcccgatacatggttgcactacagattgccagggagccccttgtcagacaggtgctgagacaagcctttcaggagagagccaagctaaacataaccccaaccaagaaaggtagaaaggatgtggatgaggcccactacgcttactcttttaagtacttaaagaacaagcctgttaaagagctgagagacgaccagttcctcaagataggcctggctgaggatgaagggctgctcaccattgacatcagcatagatatgaagggagtggaagggtatggtaatgaccagacatattttgaggagatcaagcagttttactaccgggatgagttcagccaccaagtacaggaatggaaccggcagcgcactatggccattgagcgagctctgcagcagttcctctacgtgcaaatggccaaagaacttaagaacaagctgctagctgaggccagggagagtgttgtgaaggcctgtagccgaaagctctacaactggttgagagtggcaccctaccgtccagatcagcaggtagaggaggacgacgactttatggatgagaaccaggggaagggcatccgagtcctaggcattgctttctcctctgccagagatcaccctgtgttctgtgccctagtcaatggtgaaggagaagtgactgatttcctccgcctgccccattttaccaagcggcgaactgcatggagagaagaggagcgggaaaagaaggctcaagatattgaaaccctaaagaagtttcttgtgaataagaagcctcatgtggtcactatcgcaggagagaacagggatgcccagatgctgactgaggatgtgaagcggatagtgcatgagctggaccaaggccaacagctgtcttctattggggtggagctggttgacaatgagctggccattctgtacatgaacagcaagaaatcagaggcagagttccgggattatccaccagttttgagacaagctgtctctctagcccggcgtatccaagaccctctgatagaatttgcccaggtgtgcagctcagatgaagacatcctgtgtctcaagtttcatcccttgcaggagcatgttgtgaaagaggagctgcttaacgccttgtactgtgaattcatcaaccgggtcaatgaggtcggggtggatgtcaaccgtgccattgcccatccttacagccaggccttgatccagtatgtctgtggcctgggaccccgaaaagggacccacctgctgaagattttgaaacagaacaacactcgactcgagagccggactcagctggtcaccatgtgtcatatgggtcccaaagtcttcatgaattgtgctggcttcctcaagatcgacactgcttctctgggggacagcactgactcatacattgaagttcttgatggctctcgagtccaccctgaaacgtacgagtgggccaggaagatggcagtggatgccttagaatacgatgagtctgcagaagatgccaatcctgctggagcccttgaggaaatcttggaaaacccagagcggctgaaggatttagatcttgatgcctttgcagaagaactagagagacagggctatggtgacaagcacatcacactgtatgacatccgagcagagctcagttgtaggtataaggacctccggacagcctaccgctctcctaacacagaggagatcttcaatatgttaaccaaagagacgccagagaccttctacattggaaagcttatcatctgcaatgttaccggcattgctcacaggcgcccacagggtgagagctatgaccaggccatccgaaatgatgagacagggctgtggcagtgccccttctgtcaacaagacaacttccctgagctaagcgaggtctggaaccattttgacagtggatcatgccctggtcaggccattggtgtgaaaacacggctagacaatggcgtcaccggcttcatccctaccaaattcctcagtgacaaggtggtgaagaggccagaggagcgagtgaaggtggggatgactgttcactgccggatcatgaagatcgatattgaaaagttcagtgcagacctgacctgccggacctcagacctcatggacaggaacaatgagtggaaactgcccaaggacacctactatgactttgatgcggaagctgcagaccacaagcaggaagaggatatgaaacgaaagcagcagcggaccacatacatcaagcgagtgattgcacacccgtccttccataacataaatttcaagcaagcagaaaagatgatggagaccatggaccaaggggatgttatcattcggcccagcagtaaaggtgaaaaccatctgacggtgacctggaaagtcagtgctggcatctaccagcacgtggacgtgcgggaagagggcaaggagaacgccttcagcctgggagccactctttggatcaacagtgaggaatttgaagacttggatgagattgttgcccgctatgtccagcccatggcttcctttgctcgagaccttctgaaccacaaatattaccaggactgtagtggtggggaccgaaagaaattagaggagctgctcatcaaaactaagaaggagaagcccaccttcatcccttacttcatctgtgcctgcaaggagctgcccggcaagttcctcctgggataccagccccggggtaaacccaggatagaatatgtaacagtgactcctgaaggattccggtaccggggccagattttcccaactgtgaatggactcttcaggtggtttaaggatcactatcaggatcctgtaccaggcatcactcccagtagcagtaacagaacacggacccctgcttctatcaatgctaccccagccaacatcaatcttgcagatctcacacgggctgtgaatgccttgcctcagaacatgacttcacagatgttcagtgccattgctgctgtgacaggccaggggcagaaccccaatgctaccccagcccagtgggcatccagccagtatggctacggtggcagcggaggaggcagcagcgcctaccatgtgttcccaacaccagcccagcagccagtggccacaccactaatgaccccaagctactcctatactaccccgagccagcccatcaccaccccacaataccaccagctccaggccagcaccaccccacagtctacacaggcccagccccagccttcctccagctcccgacaacggcaacagcagccaaagtccaacagccatgcagctatcgactggggcaagatggccgagcagtggctacaggaaaaggaggcagaacgacggaaacagaaacagcggctgaccccacgaccctctcccagccccatgatcgagagcacccccatgtccattgctggcgatgcgaccccactcctggacgagatggatcggtagggggcctgttcctcggactctggttacctctgaagctcccaagaggcctggccacttatggcctcactccctgcccctcttttttttttgtccataaagtggcgtgaaatgacgttctttttagtggtcagcctggctggatggtggccttgtgagctggtgtgcaccgagcagcagctgttccactccgggcttgtgctaaccacctgttctggggccaggctgggagagcagtatggcagggaggagagcaaaggtggagcagtctgtaatgtctctggaagccctcacctgagacaggccatcatgaggcatgcagctcaattgtctatgtccccagcctgtgtggggacaccgatgctatttattcagtttggggcaggagggaaagtagctctgatcctgatggcaagaccttggctgtcaaagcaggactgtgagggcatgtggagcagtgctgagctgccagcccctgcctgcctgcctgcctgccttccctcatcacctaacctcacctgcttctcgcctgtcatttgaataaacagtgtttgtacagag

SEQ ID NO: 111 - protein, 459 aa, Mus musculus
  Zinc finger protein ZPR1
MSASGAVQPGHPGAAVGPSPAAAASPATGPLFRPLSAEDEEQQPTEIESLCMNCYRNGTTRLLLTKIPFFREIIVSSFSCEHCGWNNTEIQSAGRIQDQGVRYTLTVRSQEDMNREVVKTDSATTRIPELDFEIPAFSQKGALTTVEGLISRAISGLEQDQPTRRAVEGAIAERIDEFIGKLKDLKQMASPFTLVIDDPSGNSFVENPHAPQKDNALVITYYDRTPQQAEMLGLQAEAPEEKAEEEDLRNEVLQFNTNCPECNAPAQTNMKLVQIPHFKEVIIMATNCENCGHRTNEVKSGGAVEPLGTRITLHITDPSDMTRDLLKSETCSVEIPELEFELGMAVLGGKFTTLEGLLKDIRELVTKNPFTLGDSSNPDQSEKLQEFSQKLGQIIEGKMKAHFIMNDPAGNSYLQNVYAPEDDPEMKVERYKRTFDQNEELGLNDMKTEGYEAGLAPQR

SEQ ID NO: 112 - DNA, 2162 bp, Mus musculus
  Zinc finger protein ZPR1
ccgctccccgttcctccacaaccacaacctttctttttcaaagaagatttgccccggggaagccgccgcgggagcaacgcgtggggagatgtctgccagcggggctgtgcagccgggacacccgggggccgccgtcgggccctcgcccgctgcggctgcgtcaccagccaccgggcctttgttccggcccctcagcgccgaagatgaggagcaacagcccaccgagatcgagtcactgtgcatgaactgttaccggaacggcacgacgcgacttctgctcaccaagatccccttctttagagaaatcatcgtgagctccttttcctgcgaacactgtggctggaacaacacggagatccagtctgcaggcaggatccaggaccagggagtgcgctacaccttgaccgtgagaagccaagaggacatgaacagagaagtggtaaagacagactctgccaccacaaggatccccgagctggattttgagattccagccttcagccagaagggagctctgaccactgttgaaggactcatcagccgtgcgatctctggcctggaacaggatcagcccacacgacgggcagtggaaggtgccatcgcagagagaattgatgagttcattggcaaactgaaggacctaaagcaaatggcttcccctttcacactggtcattgatgatccctcgggaaacagctttgtagaaaacccacatgctccccagaaagataatgccttggtgatcacatactatgaccgaaccccacagcaagctgagatgctggggctccaagcagaagcaccagaggagaaggcggaagaggaagaccttagaaacgaagtgctccagttcaacactaactgcccagagtgcaacgctccggctcagaccaacatgaagcttgtccaaatcccccactttaaagaggttatcatcatggccaccaactgtgagaattgtgggcatcggactaatgaggtgaagtccggaggagctgtagaacctttgggtaccaggatcaccctccacatcacagatccctcagacatgaccagagacctcctcaagtctgagacctgtagtgtggaaatcccagagcttgagtttgaactgggaatggctgtacttgggggcaagttcaccactctagaaggactgctgaaagacatccgagaactggtaaccaagaacccattcacactgggcgacagctctaatcctgaccagtcagagaaactgcaggagtttagccagaagttgggccagatcatcgagggcaagatgaaggcccactttatcatgaatgatccagcaggaaacagttatctgcagaatgtgtatgcacctgaagacgatccagagatgaaggtcgagcggtacaaacgcacctttgaccaaaatgaggagctcgggctcaatgacatgaagacagagggctatgaggcgggcctggccccacagcggtagcagtggccagctcactggccagctacagtgccactcacactgcagggttatctgttactgtggggaactgacgaggagtgctcaagccctcgtccatggtgaagaggttaccacttgagttagaaatgtaagcacccaagattagcagctgacggacgaggcagctgcagccctactgtgctccttgaccttcttttggaggttttaaagtcggcgtgagaagaatcccagaaacaccaggcggtctgccatcaccgtttgcctgtcagctctctgacctccagtgctggacctttgaagtctggggaagtgaaatacaagtttctgctggctctgggcatgtgaagtactgactcagcagggcaaggatgtcggaggggccgagcaggcacaggtgaagacgccacattaaagtgatggcctttaaacgaaaggagaacaactatccagactcctacctcccacatggaagaaaccgccacctcatcaagttaataaagaaaaagaaaagaagggaggtccagagtcattcccacattctgttggaggaggagagaaggatgttcactacttggtgcatacaggcatgcacacggacagacaggtgcgtgcacacacacaaccacacacaaacacaggtttgctgatggaacattattatacaattctgagcttacataaaaaaaaaaaaaaa

SEQ ID NO: 113 - protein, 1324 aa, Rattus norvegicus
  KIAA0627
QAEPSGAGTELYLFAVLFDLLVSESSLDHLMAMGDDKSFDDEESVDGNRPSSAASAFKVPAPKTSGNPANSARKPGSAGGPKVGGASKEGGAGAVDEDDFIKAFTDVPSIQIYSSRELEETLNKIREILSDDKHDWDQRANALKKIRSLLVAGAAQYDCFFQHLRLLDGALKLSAKDLRSQVVREACITVAHLSTVLGNKFDHGAEAIVPTLFNLVPNSAKVMATSGCAAIRFIIRHTHVPRLIPLITSNCTSKSVPVRRRSFEFLDLLLQEWQTHSLERHAAVLVETIKKGIHDADAEARVEARKTYMGLRNHFPGEAETLYNSLEPSYQKSLQTYLKSSGSVASLPQSDRSSSSSQESLNRPFSSKWSTANPSTVAGRVSAGSSKASSLPGSLQRSRSDIDVNAAAGAKAHHAAGQSVRRGRLGAGALNAGSYASLEDTSDKLDGTASEDGRVRAKLSAPLAGMGNAKADSRGRSRTKMVSQSQPGSRSGSPGRVLTTTALSTVSSGVQRVLVNSASAQKRSKIPRSQGCSREASPSRLSVARSSRIPRPSVSQGCSREASRESSRDTSPVRSFQPLASRHHSRSTGALYAPEVYGASGPGYGISQSSRLSSSVSAMRVLNTGSDVEEAVADALKKPARRRYESYGMHSDDDANSDASSACSERSYSSRNGSIPTYMRQTEDVAEVLNRCASSNWSERKEGLLGLQNLLKNQRTLSRVELKRLCEIFTRMFADPHGKRVFSMFLETLVDFIQVHKDDLQDWLFVLLTQLLKKMGADLLGSVQAKVQKALDVTRESFPNDLQFNILMRFTVDQTQTPSLKVKVAILKYIETLAKQMDPGDFINSSETRLAVSRVITWTTEPKSSDVRKAAQSVLISLFELNTPEFTMLLGALPKTFQDGATKLLHNHLRNTGNGTQSSMGSPLTRPTPRSPANWSSPLTSPTNTSQNTLSPSAFDYDTENMNSEDIYSSLRGVTEAIQNFSFRSQEDMNEPLKRDSKKDDGDSMCGGPGMSDPRAGGDATDSSQTALDNKASLLHSMPTHSSPRSRDYNPYNYSDSISPFNKSALKEAMFDDDADQFPDDLSLDHSDLVAELLKELSNHNERVEERKIALYELMKLTQEESFSVWDEHFKTILLLLLETLGDKEPTIRALALKVLREILRHQPARFKNYAELTVMKTLEAHKDPHKEVVRSAEEAASVLATSISPEQCIKVLCPIIQTADYPINLAAIKMQTKVIERVSKETLNLLLPEIMPGLIQGYDNSESSVRKACVFCLVAVHAVIGDELKPHLSQLTGSKMKLLNLYIKRAQTGSGGADPTTDVSGQS

SEQ ID NO: 114 - DNA, 5614 bp, Rattus norvegicus
  KIAA0627
gcaggccgagcccagtggcgcaggcactgagctgtacttatttgctgtgctatttgacctcttggtttcagagagctccctggaccatctaatggctatgggagatgataaaagcttcgatgatgaagaatcagtggatggaaataggccatcatcagctgcatcagccttcaaggttcctgcacctaaaacatccggaaatcctgccaacagtgcaaggaagcctggttcagcaggtggccctaaggttggaggtgcttctaaggaaggaggtgctggagcagttgatgaagatgattttataaaagcttttacagatgtcccttctattcagatttattctagtcgagaactcgaagaaacattaaataaaatcagggaaattttgtcagatgataaacatgactgggatcagcgtgccaatgcactgaagaaaattcgatcactgcttgttgctggagctgcacagtatgattgcttttttcaacatttacgattgttggatggagcacttaaactttcagctaaggatcttagatcccaggtggttagagaagcttgtattactgtagcccacctttcaacagttttgggaaacaagtttgatcatggcgctgaagccattgtacctacactttttaatctcgtccccaatagtgcaaaagtcatggcaacttctggatgtgcagcaatcagatttatcattcggcatactcatgtacccagacttatacctttaataacaagcaattgcacatcaaaatcagttcccgtgaggagacgttcatttgaatttttagatttattgttgcaagagtggcagactcattcattggaaagacatgcagccgtcttggttgaaactattaaaaagggaattcatgatgctgacgctgaggccagagtggaggcaagaaagacatacatgggtcttagaaaccactttcctggtgaagctgaaacattatataattcccttgagccatcttatcagaagagtcttcaaacttacttaaagagttctggcagtgtagcatctcttccacaatcagacaggtcctcatccagctcacaggaaagtctcaatcgccctttttcttccaaatggtctacagcaaatccatcaactgtggctggaagagtatcagcaggcagcagcaaagccagttcccttccaggaagcctgcagcgttcacgaagtgacattgatgtgaatgctgctgcaggtgccaaggcacatcatgctgctggacagtctgtgcgaagggggcgcttaggtgcaggtgccctgaatgcaggttcctatgcgtcactagaggatacttctgacaagctggatggaacagcatctgaagatggccgggtgagagcaaaactttcagcaccacttgctggcatgggaaatgccaaggcagattctagaggaagaagtcgaacaaaaatggtgtctcaatcacagcctggtagccggtctgggtctccaggaagagttctgaccacaacagccctgtccactgtgagctctggtgttcaaagagtcctggtcaattcagcctcagcacaaaaaagaagcaagataccacggagccagggctgtagcagagaggctagtccatctaggctttcagtggcccgaagcagtcgtattcctcgaccaagtgtgagtcaaggatgcagccgggaagctagtcgggagagcagcagagacacaagtcctgttcgctcttttcagcccctcgcctccagacaccattccagatcaactggtgccctctacgcccccgaagtgtatggggcctcaggtccaggttatgggatcagccaatcaagtcgactgtcgtcttctgttagtgccatgcgagtcctgaacacaggttctgatgtggaggaggcggtggcagatgccttgaaaaaaccagctcgaagaagatatgaatcatatggaatgcattcagatgatgacgccaacagcgatgcatctagtgcttgttcagaacgctcctatagttctcgaaatggtagtattcctacatatatgaggcagacggaagatgtggcagaagtcctcaatagatgtgctagttccaattggtcagaaaggaaagaaggcctcctaggtctgcagaacttattaaaaaatcagagaacactaagtcgagttgaactgaaaagattatgtgaaattttcacaagaatgtttgctgaccctcatggcaagagagtattcagcatgtttttggagactctagtggatttcatacaagtccacaaagatgatcttcaagattggttgtttgtactgctgacacaactactaaaaaaaatgggtgctgatttgcttggatctgttcaggcaaaagttcagaaagcccttgatgttacaagagagtcttttccaaatgatcttcagttcaatattctaatgagatttacagttgatcagacccagacaccaagcttaaaggtgaaggttgctatccttaaatacatagaaactctggccaaacagatggatccaggagattttataaattccagtgaaactcgcctagcagtgtctcgggtcatcacttggacaacagaacccaaaagttctgatgttcggaaggcagcacagtcagtgctgatttcattatttgaactcaataccccagagtttacaatgttattaggagctttaccaaaaacttttcaggatggtgctaccaagcttcttcataatcaccttcgaaacactggcaatggaacccagagttccatggggagtcctttgacaagaccaacaccacgatcaccagctaactggtccagtcctcttacttctcctaccaatacatcacagaatactttatctccaagtgcatttgattatgacacagaaaatatgaactctgaagatatttatagctctcttagaggtgtcactgaagcaatccagaatttcagcttccgtagccaagaagatatgaatgagccattgaaaagggattctaaaaaagatgatggcgattcaatgtgtggtggtcctgggatgtctgacccaagagcaggaggtgatgctactgactcaagtcaaacagctcttgataataaagcttcattgctccattcaatgcctactcactcctctccacgctctcgagactataatccatataactattcagatagcatcagtcccttcaacaagtctgccctcaaggaagccatgtttgatgatgatgctgaccagtttcctgacgatctttccctagatcattctgacctagttgcagagttgttgaaggagctgtctaaccataatgagcgtgtagaagaaagaaaaattgccctctatgaacttatgaaactgacacaggaagaatcttttagtgtttgggatgaacacttcaaaacaatattgcttttattgcttgaaacgcttggagataaagagcctacaatcagggctttggcattaaaggttttaagagaaatcctaaggcatcaaccagcaagatttaaaaactatgcagaattgactgtcatgaaaacattggaagcacataaagatcctcataaggaggtggtgagatctgctgaggaagcggcatcagtgttggccacttcaattagtccagagcagtgcatcaaagtgctttgtcctatcattcaaactgcagactacccaattaatctggctgcaatcaaaatgcaaacaaaagtgatagagagagtgtccaaggaaaccctaaacctgcttttgccagagattatgccaggtctaatacagggttatgataattcagagagcagtgttcggaaagcttgtgtcttctgcctggtggctgttcatgcggtaattggtgatgaactaaaaccacatctcagtcaacttactggcagtaaaatgaagctactgaatctttacatcaaacgtgcacaaacaggttctggaggagctgatcccactactgatgtttctggacaaagttagtgaagctcatcacagcgaaccaggtctctcaaaagaaaggacagatagaccaccctcatcaatgaaaggaagttctcaaacacatcctttggaacttactattgtttcccagttttagttttttgtttcgtttcgttttgtattttctgtaacagaggactatcctcagtctgcatgtaacttttatgatagttattccaaattcaagaagaagcagtattaacatcaactgatcgacacaaagtaatttttaatttaattcatcatttcacatgtttgtactttgtcttcccattaacctttgccagtgttatgattgtataaatttttttaaatgctggttaaacaggaatgcttaaagctttaaaagtttaacagtctaaaacatttttgcttttattcaactgcagaataatatttttattgctactttgagttttgtttcgtatcatgtcctatgctagaaatatttaaatgatgtgaaacaaagcaggactaatttgaactacagctggactccgtttgtgtgatggtgatacatgtcattagttgcaacttctttggggtgatctatagtttgaaaactaaaacctcaaagacagatgttacagaatcagccagttctgtaaaactgatattgtctattggttattgatcttgccatctttatttaaaaccatgtcccttctatgatcccttaagaaagctgcaccaaatcatctgcctgttttttcttgatacttactgaaatagaaggttttattgcagggtttattttggtttgtttatatctttgttgtgaatgatgcttttttgtatttattaatatcaaattcacttatgaataaacttgataatggaaacggacaaaaaaaatcaagtgcgtgtgtgtccttgaccgtcttctgtttctcacgtaataaacaaattatcgagacatgggagtgaccagcaccttttctttaaatggtggaacctggtttccttttaccatgaaattgtcttacttgaaaatattgatcctgatgagagagaagatggtgccaaggctgtctttgtataatgggctcaaattctctacctcttcagggctaatacttttaactgagctgctgcctatagtgtcttttggaaaactacttaaagggtgattttctgttactttttagcaaatttttttaatcacctcttgctacacccattcttttcatgtgcagccgactcaaaaattaccagttttggtgaaaggctaaattagataatttggaaccaggatactaatgatttctcatctttacttttttttaatcctaatataaagtgaatttgattgaaaaggcaaatagctattagggaagcagtttgccattgttgcagagttatctgtactttgtttaactgaaaaaaatgtagaaatatatgtaaagaatttaagacaagagtactgaatggatgatttgtcataggctttcccctttctttctgttctagcagcaggaaaagtttctctatatcctctccctctacctgtaacaattttgttttctactgttaattacattgtgtatttatagttctatgcttactgttgtgcatatactggcaataaaactgtacataacattacttgaaaaagtt

SEQ ID NO: 115 - protein, 463 aa, Rattus norvegicus
  Statin-related protein
MGKEKTHINIVVIGHVDSGKSTTTGHLIYKCGGIDKRTIEKFEKEAAEMGKGSFKYAWVLDKLKAERERGITIDISLWKFETTKYYITIIDAPGHRDFIKNMITGTSQADCAVLIVAAGVGEFEAGISKNGQTREHALLAYTLGVKQLIVGVNKMDSTEPAYSEKRYDEIVKEVSAYIKKIGYNPATVPFVPISGWHGDNMLEPSPNMPWFKGWKVERKEGNASGVSLLEALDTILPPTRPTDKPLRLPLQDVYKIGGIGTVPVGRVETGILRPGMVVTFAPVNITTEVKSVEMHHEALSEALPGDNVGFNVKNVSVKDIRRGNVCGDSKADPPQEAAQFTSQVIILNHPGQISAGYSPVIDCHTAHIACKFAELKEKIDRRSGKKLEDNPKSLKSGDAAIVEMVPGKPMCVESFSQYPPLGRFAVRDMRQTVAVGVIKNVEKKSGGAGKVTKSAQKAQKAGK

SEQ ID NO: 116 - DNA, 1719 bp, Rattus norvegicus
  Statin-related protein
cagcgccaccagtccctctgactgagacctcggctctagagttcctgcccagcaaattccctcaacccagagccagagcccccacagtgccagcccgtccctcactcaggcagaatgggcaaggagaagacacacatcaacattgtggtcattggccacgtggactcaggcaagtctaccacgacaggccatctcatctacaaatgtggcggcatcgacaagcggaccatcgagaagtttgagaaggaggcagcagagatggggaagggctcctttaaatatgcctgggtgctggacaagctgaaggcagagcgggagcgcggcatcaccatcgacatctccctctggaagtttgagaccaccaagtactacatcaccatcattgatgctccaggccaccgggacttcatcaagaacatgattactggcacatcccaggccgactgtgcagtactgatcgtggcagcgggcgtgggcgagtttgaggcgggcatctccaaaaacgggcaaacccgggaacacgcactcctggcctacactctgggtgtgaaacagctcattgtgggtgtcaacaagatggactccacggaaccagcctacagcgagaagcgctacgatgagattgtcaaggaggtcagcgcctacatcaagaagatcggctacaacccagccacggtgcccttcgtgcccatctcgggctggcacggtgacaacatgctggaaccttcacctaatatgccatggttcaagggctggaaggtagagcgtaaggaaggaaatgcaagcggcgtgtccctgctggaagccctggacacaatcctgccccccacccgccccactgacaagccccttcgtctaccgctgcaggatgtgtacaagattggtggcattgggactgtacctgtgggcagagtggagaccggtatcctccgtcctggtatggtggtgacctttgcgccagtcaacatcaccacagaggtgaagtctgtggaaatgcaccacgaggcgctcagcgaggccctgcctggtgacaatgtcgggttcaacgtgaagaatgtgtctgtcaaggacattcgccggggcaatgtctgtggggacagcaaagctgacccccctcaggaggccgcccagttcacctctcaggttatcatcctgaaccaccctgggcaaatcagcgctggctactcgccagtcatcgactgtcacacagcccacatcgcctgcaagtttgccgagctaaaggagaagattgaccgtcgctctggcaagaagctggaggacaatcccaagtccctgaagtctggggatgccgccattgttgagatggtcccaggaaaacccatgtgtgtggagagcttctcacagtacccacccctcggccgcttcgccgtgcgcgacatgcggcagactgtggccgtgggcgtcatcaagaacgtggagaagaagagcggcggcgccggcaaggtcaccaagtccgcacagaaggcgcagaaagcgggcaagtgaaccggcgcccggcgtggccctccccaacgcgcccgccgcgcccccagccccgcccccggcactggccccgtcccctccccgccccagccggcccctccgccccgcccccccgccaggcgcatgtctgcacctccgcttgtaagaggctctacgtcagcgactggatgctcgccatcaaagtccagtggaaattcttcaagaggaaaagcgcgg

SEQ ID NO: 117 - protein, 467 aa, Rattus norvegicus
  Dynactin subunit p62
MASLLQSERVLYLVQGEKKVRAPLSQLYFCRYCSELRSLECVSHEVDSHYCPSCLENMPSAEAKLKKNRCANCFDCPGCMHTLSTRATSISTQLPDDPAKTTMKKAYYLACGFCRWTSRDVGMADKSVASGGWQEPENPHAQRMNKLIEYYQQLAQKEKVERDRKKLARRRNYMPLAFSQHTIHVVDKYSLGTRLQRPRAGASISTLAGLSLREGEDQKEVKIEPAQAVAEVEPLPEDYYTRPVNLTEVTTLQQRLLQPDLQPVSASQLYPRHKHLLIKRSLRCRKCEHNLSKPEFNPTSIKFKIQLVAVNYIPEVRIMSIPNLRYMKESQVLLTLTNPVENLTHVTLLECEEGDPDNINSTAKVVVPPKELILAGKDAAAEYDELAEPQDFQDDPDIVAFRKANKVGIFIKVTPQREEGDVTVCFKMKHDFKNLAAPIRPMEESDQGTEVIWLTQHVELSFGPLLP

SEQ ID NO: 118 - DNA, 2573 bp, Rattus norvegicus
  Dynactin subunit p62
  misc_feature 1767: n is a or g or c or t
gcacgaggccggactgtgtcacgtgacgggtgcgccgggcgttggctcctccctcaccaagatggcgtccttgctgcagtcggagcgggttctctatctcgtccaaggagaaaagaaggttcgggccccgctctcacagctctacttctgccgctactgcagtgagcttcgatcgctggaatgtgtgtcacacgaggtggactctcattattgtcccagctgcttagaaaacatgccatcagctgaagccaaattaaaaaagaatagatgtgccaactgctttgactgtcctggatgcatgcacaccctctccacccgagctacaagcatctccacacagcttccagacgacccagccaaaaccactatgaagaaagcctattacctggcctgtggattttgtcgatggacatctagagatgtgggcatggcagacaaatctgtagctagtggtggttggcaagaaccagaaaatcctcatgcacaacggatgaacaaattgattgaatattaccagcagcttgctcagaaggaaaaggttgaacgagatcgcaagaaactggcacggcgaagaaattacatgcctttggctttttcgcaacacactattcatgtagtggataagtacagccttgggaccaggcttcagcgaccacgagctggtgcatccattagtacacttgccggactttcccttagagaaggagaagaccagaaggaggtaaagattgagccagctcaggccgtcgctgaagtggagcctctgcctgaagactattacacacgaccagtgaacctgacagaggtgaccacccttcagcagcgcctcttacagcctgacctgcagcctgtctcagcctcgcagctttatcctcgacacaagcaccttctgatcaaacggtccctgcgctgtcggaaatgtgaacacaatttgagcaaaccagaatttaatccaacatctatcaaattcaaaatccagttggttgctgtcaattatattccagaagtgagaatcatgtcgatccccaatcttcgctacatgaaggaaagccaggtcctcttgactcttacaaatccagtggagaacctcacccatgtaactctgctggagtgcgaagagggggaccctgataacatcaacagcactgctaaggtggtggtgcctcccaaagagctcatcttagccggcaaggatgcagcagcagagtacgatgagctggcagagccccaggacttccaggatgaccctgacattgtagctttcagaaaagccaacaaagtaggcatcttcatcaaagtcaccccacagcgtgaggaaggggacgtgaccgtgtgcttcaagatgaaacatgattttaaaaacctggctgcccccatccgccctatggaagaaagcgaccagggcacagaagtcatttggctcactcagcatgtggaactgagctttggccctcttcttccttaaaacaaagctacctggtgggcagatcccacccagccatgtcactacagctctcaacagtgtggaagctgctgcttcatcagacatgtttataaagatgtactactgaatcctgtggagtggagggcaggccagggttcggagcacagggtaactgctgttgacaccagtaagcctgtgtctctctgagccctgcacattgagtaacagcatcgttccatcacagtaaaggagtagctgttccatggagggcattgtatttactcgctaagaaacgtgctgtgcgcctgtcacagtttgacagnaagccttagggtgataatccagagcagaccttgtctttgtgccgcagctttggtctcggtgttccaacggctttctgtatttctgtatgccgttaaggataaccctgaaatcataacccttcactggccttggccctggctctcactttgccgatgatttccatttgacagagcagtaggactgtcattgtgtctctaacctagtgatggcagggcaacctgtcgctttcctaaggcactctgtctcttccaaaggaacacagtatacctgtcacttgattgtcattttcctcattagtatatgggacttgtaagtaagaatttgaatggcaagcagttacatgtcatgaaattcatttgttttaatattaccacaatacccaggggctaaggctgcctgccacagggagacaaactttatgaatcttactatctgccctcctctgttctgttttttgtttgtttgtttgtttgtttgtttttcagatgggctcgctccgtgtaactctcgctggcctgaactcaacctgctaggactaaagatccttgcaacatgtccagctcgctgccctgttctataaatcaagaaattgctctaacgttggggcttttagaaagagctgggacagtttatatggacactttgctgcatcacttctggaatgcagaaaacattttaaactaacttttagcatgatccaaactaatgttctttctgctgaattgaaggaaaaattaactgtcaatcccttaaatttaaaactggacacaaagaaaaagaactttcccttaatgaaaaaaaaaaa

SEQ ID NO: 119 - protein, 1616 aa, Rattus norvegicus
  Phosphacan
MRILQSFLACVQLLCVCRLDWAYGYYRQQRKLVEEIGWSYTGALNQKNWGKKYPICNSPKQSPINIDEDLTQVNVNLKKLKFQGWEKPSLENTFIHNTGKTVEINLTNDYYLSGGLSEKVFKASKMTFHWGKCNVSSEGSEHSLEGQKFPLEMQIYCFDADRFSSFEETVKGKGRLRALSILFEIGVEENLDYKAIIDGTESVSRFGKQAALDPFILQNLLPNSTDKYYIYNGSLTSPPCTDTVEWIVFKDTVSISESQLAVFCEVLTMQQSGYVMLMDYLQNNFREQQYKFSRQVFSSYTGKEEIHEAVCSSEPENVQADPENYTSLLITWERPRVVYDTMIEKFAVLYQPLEGNDQTKHEFLTDGYQDLGAILNNLIPNMSYVLQIVAICSNGLYGKYSDQLIVDMPTEDAELDLFPELIGTEEIIKEENYGKGNEEDTGLNPGRDSATNQIRKKEPQVSTTTHYNHMGTKYNEAKTNRSPTRGSEFSGKSDVLNTSLNPTSQQVAEFNPEREMSLPSQIGTNLPPHSVEGTSASLNSGSKTLLVFPQMNLSGTAESLNMVSITEYKEVSADLSEEENLLTDFKLDSGADDSSGSSPASSTVPFSTDNLSHGYTSSSDTPEAVTYDVLRPESTRNALEDSAPSGSEESLKDPSLEGSVWFPGSTDLTTQSETGSGREGFLQVNSTDFQVDESRETTETFSPDATASRGPSVTDMEMPHYSTFAYPPTEVTSHAFTPSSRPLDLAPTSNILHSQTTQPVYNGETPLQPSYSSEVFPLVTPLLLDNQTLNTTPAASSSDSALHATPVFPSVGVSFDSILSSYDDAPLLPFSSASFSSDLFHHLHTVSQTLPQVTSAAERDELSLHASLLVAGGDLLLEPSLVQYSDVMSHQVTIHAASDTLEFGSESAVLYKTSMVSQIESPSSDVVMHAYSSGPETSYAIEGSHHVLTVSSSSAIPVHDSVGVADQGSLLINPSHISLPESSFITPTASLLQLPPALSGDGEWSGASSDSELLLPDTDGLRTLNMSSPVSVADFTYTTSVSGDDIKPLSKGEMMYGNETELKMSSFSDMAYPSKSTVVPKMSDIVNKWSESLKETSVSVSSINSVFTESLVYPITKVFDQEISRVPEIIFPVKPTHTASQASGDTWLKPGLSTNSEPALSDTASSEVSHPSTQPLLYEAASPFNTEALLQPSFPASDVDTLLKTALPSGPRDPVLTETPMVEQSSSSVSLPLASESASSKSTLHFTSVPVLNMSPSDVHPTSLQRLTVPHSREEYFEQGLLKSKSPQQVLPSLHSHDEFFQTAHLDISQAYPPKGRHAFATPILSINEPQNTLINRLVYSEDIFMHPEISITDKALTGLPTTVSDVLIATDHSVPLGSGPISMTTVSPNRDDSVTTTKLLLPSKATSKPTHSARSDADLVGGGEDGDDYDDDDYDDIDSDRFPVNKCMSCSPYRESQEKVMNDSDTQESSLVDQSDPISHLLSENTEEENGGTGVTRVDKSPDKSPPPSMLPQKHNDGREDRDIQMGSAVLPHTPGSKAWAVLTSDEESGSGQGTSDSLNDNETSTDFSFPDVNEKDADGVLEADDTGIAPGSPRSSTPSVTSGHSGVSNSSEAG

SEQ ID NO: 120 - DNA, 6801 bp, Rattus norvegicus
  Phosphacan
cctagaccctggccagtcaccggcgtcccctgtctcggtgttcccactctctgcaccctaagctgtacccctgcggctggcgaggggccgcggacccggctggagatgcgaatcctgcagagcttcctcgcgtgcgttcagctactgtgcgtgtgtcgcctggactgggcttatggatactacagacaacagagaaaacttgttgaagagattggctggtcctatacaggagcactaaatcaaaaaaattggggaaagaaatatccaatatgtaatagcccaaagcagtctcctattaatattgatgaagatcttacacaagtaaatgtgaatcttaagaaactgaaatttcagggttgggaaaaaccatccttggaaaacacgtttattcacaacactgggaaaacagtggaaataaatctcaccaatgactactatctcagtggaggactttcagaaaaggtcttcaaggcaagcaaaatgacttttcactgggggaaatgcaatgtgtcatcggaaggatcggaacacagcttagaagggcagaagtttccactcgagatgcaaatctactgcttcgatgcggaccgattttcaagttttgaggaaacagttaaaggaaaaggaaggttaagggctctatccattttatttgagattggagttgaagaaaatttggattacaaagccattattgatgggactgaaagtgttagtcgttttggaaagcaggctgccttagatccgttcatcttgcagaacctcctgccaaactccactgacaagtactacatttacaacggatcactgacatcccctccctgcacagacaccgtcgaatggattgtttttaaggatacagttagcatctctgaaagccagctggctgtattttgtgaagttctcacaatgcaacagtccgggtatgtcatgttgatggattacttacaaaacaatttccgagaacaacagtacaagttttccaggcaggtgttttcttcgtacactgggaaggaagagattcatgaagcagtgtgcagttcagaaccagaaaatgtgcaagctgaccctgagaattacaccagccttctgatcacatgggaaaggcctcgggttgtttatgacacaatgattgagaagtttgcggttctgtaccagccactggagggaaacgaccaaaccaagcatgagtttttaacagatggctatcaggacttgggtgccattctcaataacttaatacctaacatgagttatgtgctccaaatagtggccatatgctctaatggcctttatggaaagtacagtgaccaattgatagtcgacatgcctactgaggatgctgaacttgacctctttcctgaattaattggaactgaagaaataatcaaggaggaaaactatggaaaaggcaatgaagaagacactggcttgaatcccggtagagacagtgccacaaaccaaataaggaaaaaggaaccccaggtttctaccacaactcactataatcacatggggactaaatataatgaagccaagactaaccgatctccaacgagaggatctgaattctctggaaagagtgatgttctcaacacatccctgaatcctacttcccaacaggttgctgaattcaatccagaaagagaaatgtccttgccttctcagattggaactaacctgccaccacacagtgtggaaggcacctcagcctccttaaacagtggctctaaaactctccttgtcttcccacagatgaacttgtctgggactgcagaatccttaaatatggtttccataacagagtacaaagaggtgtctgctgacctcagtgaggaagaaaacttactgactgatttcaagctcgatagtggagcagatgattcgtcaggctctagccctgcatcctccactgtccccttttccacagataatctatcccatggatatacgtcttcttcagacacgcccgaggcggtcacgtatgatgtccttaggccagaatctacgagaaatgctctagaggattcggctccatcaggttcagaagaatcactaaaggatccctctcttgaagggagtgtgtggttccctggatccacagacctaacaacacagtctgagactggatctgggagagagggctttctccaagttaactccacggacttccaagttgatgaatcgagggagacaactgagacattttctccagatgctaccgcgtcccggggtccttcggtcacagatatggaaatgccacattattctacctttgcctaccccccgactgaagtaacatcacatgctttcactccgtcctccagaccacttgatttggctcccactagcaacatcctccattcgcagacaactcaaccagtatacaatggtgagacacctcttcaaccttcctacagtagtgaagtctttcctctagtcacccctttgttgcttgacaatcagaccctcaacactacccctgctgcttcaagtagtgattcggccttgcatgctacgcctgtattccccagtgttggtgtgtcatttgactccatcctgtcttcctatgatgatgcacctctgctcccattttcctctgcttccttcagtagtgacttgtttcaccatctgcatacggtttctcaaacccttccgcaagttacttcagctgctgagagggatgagctgtctttgcatgcttctctgctggtggctgggggtgatttgctgttagagcccagccttgttcagtattctgatgtgatgtcacatcaggtcactattcatgctgcttcggacacattggaatttggtagtgagtctgctgtcctttataaaacgtctatggtttctcaaatcgaatcacccagcagtgatgtcgttatgcatgcatattcgtcagggcctgaaacttcttatgccattgagggctcccaccacgtgctcactgtttcttccagttctgcaatacctgtgcatgattctgtcggtgtagctgatcaggggtccttacttatcaatcctagccatatatcactgcctgagtcctcatttattactccaactgcatcattactgcagcttcctcctgccctctctggtgatggggagtggtctggagcctcctctgatagtgaattgcttttacctgacacagatgggctgagaactcttaacatgtcttcacctgtttctgtagctgattttacatacacgacatctgtgtctggcgatgatattaagccgctttctaaaggtgaaatgatgtatggaaatgagaccgaactgaaaatgtcttctttcagtgacatggcatacccttctaaaagcacagtcgtgccaaagatgtctgatattgtaaataagtggagtgaatctttaaaagaaacctctgtttccgtatctagcataaacagcgtgtttacagagtctcttgtttatcccataactaaggtttttgatcaggagattagtcgagttccagagattatcttcccagttaaacctacacacacagcatctcaagcatctggtgacacttggcttaaacccgggcttagcacaaactcagagcctgcgctctctgacactgcttctagtgaagtatcacacccttcaacacagcccttgctctatgaggccgcatctccttttaatacggaagcattgctgcaaccttcctttccggcttctgatgttgacaccttgcttaaaactgcccttccctctgggcctcgtgatccagtgctgactgaaacccccatggttgagcaaagtagctcttccgtatctcttcccctggcatcagagtctgcttcaagcaaaagcacgctgcactttacatctgtaccagttctcaatatgtcaccttctgatgtgcaccccacttcacttcaacgcttaacagttcctcactcgagggaggaatattttgaacaaggtttgcttaagagcaaaagtccccagcaagtcctgccgtccttgcacagccatgacgagtttttccaaactgcacatctggacattagccaggcctaccctccaaaaggaaggcatgcatttgctactcctattttatcaatcaatgaaccacaaaatacacttataaacaggcttgtgtattctgaggacattttcatgcaccctgaaatttctattactgataaggcacttactggtctaccaacgaccgtttctgatgtacttatagctactgaccattctgttccattaggaagtgggcccatttccatgacaactgtttctcccaacagagatgattctgtgaccacaaccaagttgcttcttccttctaaagctacttctaagccgactcatagtgccagatctgatgccgatttagtaggaggtggtgaagatggtgatgactatgatgatgatgattatgatgacatagatagtgatcgctttcccgtaaataagtgtatgtcatgttcaccctatagagaatcacaggaaaaggtaatgaatgactcggacacccaagaaagcagtcttgtggatcagagtgacccaatttcacatttgctctctgagaataccgaagaagaaaatggaggcacgggtgtaactagggtggataaaagtcctgataagtcaccaccaccaagtatgctaccccagaagcacaatgatggaagagaggaccgtgacattcagatgggtagtgctgtccttcctcacaccccaggatctaaagcatgggcagttttgacaagtgatgaagagagtgggtcagggcaaggcacctcagatagccttaatgataatgagacttccacagatttcagtttcccagatgttaatgaaaaggatgctgatggtgtcctggaagcagatgacacaggcatagctccgggatctccacggtcctccacaccatctgttactagtgggcattcaggagtatccaacagttcagaggcaggttagttatgagcaaagggatagaacgagatgtgctgattttcttgctatgaaagtaaaaatagaagagtcacggaagaaaagaattctggtccaccagcagatcttcactttctaatcagaacgttcaatacatttatagctcttataaatatggttttactcatgatttcgaatgaatatccaacatattttggttattgatttttattatcttcaaaatgcattgtgtgctgttactaatccctattcctattgtgtgtagtatcaactatgtatgcataatacgccattagaatattacaacgcagtgtgctgtgttaagacagtttaaatgttcatacttgtattctgaaacaagttgtacacaaactctattggatttaaaatctcagtaatatgctataagcacccatccaccaatggtggacacttcacatgtgcacaacagcttggagagcttctcaaaagaactacagggctaagatttgatagctaaggaaggtttttataaacatcatactgcttttaaactatccttgagcttcttttttgttgcctaaagagggcagtataaaccaccaaaatacattctactttgtgtttgttacagtattccaacttactaatcgacatgaatatgcagaagatgcataggtattgtatgacaagatgtaaaagaaaaagcctacagccttttctgtagagatgcatttcattgttaatatattttatgcaaatgggtttattagccagatgtttcttggagcagactgcaacctagaatacagatgtgtgctttaaatgtcaatggtaacaaaattcgaaattccattaagtgtttaaaaaaaaaactaggtgattccattgaattcacggcaagaattttataatttgctttgattaagtgatgaggtttttttttaatgcacaaggaaagtatttaaatcttagcaagtcaaaagataagataatgtataatgtgacattgggtaataattgcacagagcttaatattaaaaatccacagtatagagccaatctcattaaaatatatattctctttgttattttcatcattcacattagttgtaaactctttagtatggcagcaattaagagattatatatttagataagacagtttctttcttttctgtattctgacgtgatctccacttaacgttgaatttcagcttcaatatatgaactgatgtgtgagaaggagtaatgagtccatgggtcactgtagtcaggaatgttgttacatatgtgaattgttatctgtcctcaattatagcacttgtttttctttctatatttttagatttatctgaaagggaaagatcgtgaacatactctaatggacagaccatgcatatacatatatcccaaagcactatatctagaattatcgaagaaagttatttctcttagatgtactaattagatttatttaactgttaagagtaagttcccccactaatgaaaacacagcaatatggataaaacatccatcttcaggaaataatacagttaatgaagggagtaggatcaaatagaattagggaaaacaatttttacctgtttttaaagctgtatctgtaaaactaattcaaagtcagtcttatccaattattgaatattccctagtctgaaactcatcatttatggtacttctaaattgtagaaaaactgacatgatgtttcctaaactaatataaatagggcaaatatagatgagagtgaacaaagactgtaagatacttgctctggttcacataaagagtccatccaaaactaaccctgggaatgtattattagtgtctgtctcttagaacatgcttacat

SEQ ID NO: 121 - protein, 530 aa, Homo sapiens
  EP70-P-iso
MRPLPGALGVAAAALWLLLLLLPRTRADEHEHTYQDKEEVVLWMNTVGPYHNRQETYKYFSLPFCVGSKKSISHYHETLGEALQGVELEFSGLDIKFKDDVMPATYCEIDLDKEKRDAFVYAIKNHYWYQMYIDDLPIWGIVGEADENGEDYYLWTYKKLEIGFNGNRIVDVNLTSEGKVKLGSKYYNPDVIFSKMEKSDVKFEDRFDNILIVLFSHRIHWFSIFNSFMMVIFLVGLVSMILMRTLRKDYARYSKEEEMDDMDRDLGDEYGWKQVHGDVFRPSSHPLIFSSLIGSGCQIFAVSLIVIIVAMIEDLYTERGSMLSTAIFVYAATSPVNGYFGGSLYARQGGRRWIKQMFIGAFLIPAMGVHCLLHQFHSHLLPCFKSHSFWNNGGRLLHLFFCYSSSKSCWYNTWPKSVRSAQLSLSCQCCASSYTGEKMVHGAAVIVCLGGILPFGSIFIEMYFIFTSFWAYKIYYVYGFMMLVLVILCIVTVCVTIVCTYFLLNAEDYRWQWTSFLSAASTAIYVYMYS

SEQ ID NO: 122 - DNA, 3389 bp, Homo sapiens
  EP70-P-iso
ggcacgaggggcgcggaggatgaggccgctgcctggcgctcttggcgtggcggccgccgcgctgtggctgctgctgctgctgctgccccggacccgggcggacgagcacgaacacacgtatcaagataaagaggaagttgtcttatggatgaatactgttgggccctaccataatcgtcaagaaacatataagtacttttcacttccattctgtgtggggtcaaaaaaaagtatcagtcattaccatgaaactctgggagaagcacttcaaggggttgaattggaatttagtggtctggatattaaatttaaagatgatgtgatgccagccacttactgtgaaattgatttagataaagaaaagagagatgcatttgtatatgccataaaaaatcattactggtaccagatgtacatagatgatttaccaatatggggtattgttggtgaggctgatgaaaatggagaagattactatctttggacctataaaaaacttgaaataggttttaatggaaatcgaattgttgatgttaatctaactagtgaaggaaaggtgaaactgggttccaaatactataatccagatgtcatattcagtaaaatggaaaagtcagatgtgaaatttgaagatcgatttgacaatatcttgatcgtccttttttcacatcggattcattggttttcaattttcaactccttcatgatggtgatcttcttggtgggcttagtttcaatgattttaatgagaacattaagaaaagattatgctcggtacagtaaagaggaagaaatggatgatatggatagagacctaggagatgaatatggatggaaacaggtgcatggagatgtatttagaccatcaagtcacccactgatattttcctctctgattggttctggatgtcagatatttgctgtgtctctcatcgttattattgttgcaatgatagaagatttatatactgagaggggatcaatgctcagtacagccatatttgtctatgctgctacgtctccagtgaatggttattttggaggaagtctgtatgctagacaaggaggaaggagatggataaagcagatgtttattggggcattccttatcccagctatgggtgtgcactgccttcttcatcaatttcatagccatttattaccatgcttcaagagccattccttttggaacaatggtggccgtttgttgcatctgtttttttgttattcttcctctaaatcttgttggtacaatacttggccgaaatctgtcaggtcagcccaactttccttgtcgtgtcaatgctgtgcctcgtcctataccggagaaaaaatggttcatggagctgcggttattgtttgcctgggtggaattttaccttttggttcaatctttattgaaatgtatttcatcttcacgtctttctgggcatataagatctattatgtctatggcttcatgatgctggtgctggttatcctgtgcattgtgactgtctgtgtgactattgtgtgcacatattttctactaaatgcagaagattaccggtggcaatggacaagttttctctctgctgcatcaactgcaatctatgtttacatgtattccttttactactattttttcaaaacaaagatgtatggcttatttcaaacatcattttactttggatatatggcggtatttagcacagccttggggataatgtgtggagcgattggttacatgggaacaagtgcctttgtccgaaaaatctatactaatgtgaaaattgactagagacccaagaaaacctggaactttggatcaatttctttttcataggggtggaacttgcacagcaaaaacaaacaaacgcaagaagagatttgggctttaacacactgggtactttgtgggtctctctttcgtcggtggcttaaagtaacatctatttccattgatcctaggttcttcctgactgctttctccaactgttcacagcaaatgcttggattttatgcagtaggcattactacagtacatggctaatcttcccaaaaactagctcattaaagatgaaatagaccagctctcttcagtgaagaggacaaatagtttatttaaagcatttgttccaataaaataaatagagggaaacttggatgctaaaattacatgaataggaatcttcctggcacttagtgtttctatgttattgaaaaatgatgttccagaaagattacttttttcctcttatttttactgccattgtcgacctattgtgggacatttttatatattgaatctgggttcttttttgactttttttttttcccaatccaacagcatccttttttttaaaagagagaattagaaaatattaaatcctgcatgtaatatatctgctgtcatcttagttggaccaacttcccatttatttatcttaaaactatacagttacatcttaattccatccaaagaagatacagtttgaagacagaagtgtactctctacaatgcaatttactgtacagttagaaagcaaagtgttaaatggagaagatacttgtttttattaaacattttgagatttagataaactacattttaactgaatgtctaaagtgattatcttttttccccccaagttagtcttaaatcttttgggtttgaatgaaggttttacataagaaattattaaaaacaaggggggtgggtaataaatgtatataacattaaataatgtaacgtaggtgtagattcccaaatgcatttggatgtacagatcgactacagagtacttttttcttatgatgattggtgtagaaatgtgtgatttgggtgggcttttacatcttgcctaccattgcatgaaacattggggtttcttcaaaatgtgtgtgtcatacttcttttgggaggggggttgttttcttctgtttattttctgagactcctacaggagccaaatttgtaatttagagacacttaattttgttaatcctgtctgggacacttaagtaacatctaaagcattattgctttagaatgttcaaataaaatttcctgaccaaattgttttgtggaaatagatgtgtttgcaatttgaagatatctttctgtccagaaggcaaaattaccgaatgccatttttaaaagtatgctataaactatgctactctcatacaggggacccgtattttaaaatctccagacttgcttacatctagattatccagcacaatcataaagtgaatgacaaaccctttgaatgaaattgtggcacaaaatctgttcaggttggtgtaccgtgtaaagtggggatggggtaaaagtggttaacgtactgttggatcaacaaataaaggttacagttttgtaagagaaaaaaaaaaaaaaaaaaaaa

SEQ ID NO: 123 - protein, 1027 aa, Drosophila melanogaster
  ISWI protein
MSKTDTAAVEATEENSNETTSDAATSSSGEKEAEFDNKIEADRSRRFDFLLKQTEIFTHFMTNSAKSPTKPKGRPKKIKDKDKEKDVADHRHRKTEQEEDEELLAEDSATKEIFRFDASPAYIKSGEMRDYQIRGLNWMISLYENGINGILADEMGLGKTLQTISLLGYLKHFKNQAGPHIVIVPKSTLQNWVNEFKKWCPSLRAVCLIGDQDTRNTFIRDVLMPGEWDVCVTSYEMCIREKSVFKKFNWRYLVIDEAHRIKNEKSKLSEILREFKTANRLLITGTPLQNNLHELWALLNFLLPDVFNSSEDFDEWFNTNTCLGDDALITRLHAVLKPFLLRRLKAEVEKRLKPKKEMKIFVGLSKMQRDWYTKVLLKDIDVVNGAGKVEKMRLQNILMQLRKCTNHPYLFDGAEPGPPYTTDTHLVYNSGKMAILDKLLPKLQEQGSRVLIFSQMTRMLDILEDYCHWRNYNYCRLDGQTPHEDRNRQIQEFNMDNSAKFLFMLSTRAGGLGINLATADVVIIYDSDWNPQMDLQAMDRAHRIGQKKQVRVFRLITESTVEEKIVERAEVKLRLDKMVIQGGRLVDNRSNQLNKDEMLNIIRFGANQVFSSKETDITDEDIDVILERGEAKTAEQKAALDSLGESSLRTFTMDTNGEAGTSSVYQFEGEDWREKQKLNALGNWIEPPKRERKANYAVDAYFREALRVSEPKAPKAPRPPKQPIVQDFQFFPPRLFELLDQEIYYFRKTVGYKVPKNTELGSDATKVQREEQRKIDEAEPLTEEEIQEKENLLSQGFTAWTKRDFNQFIKANEKYGRDDIDNIAKDVEGKTPEEVIEYNAVFWERCTELQDIERIMGQIERGEGKIQRRLSIKKALDQKMSRYRAPFHQLRLQYGNNKGKNYTEIEDRFLVCMLHKLGFDKENVYEELRAAIRASPQFRFDWFIKSRTALELQRRCNTLITLIERENIELEEKERAEKKKKAPKGSVSAGSGSASSNTPAPAPQPKASQKRKSEVVATSSNSKKKKK

SEQ ID NO: 124 - DNA, 3700 bp, Drosophila melanogaster
  ISWI protein
agttcgtattctcgatttgtttgccgccaccgtcgctgccgcagccaacttcgcgcattcatcgcataatctagcgatagcacgcgcagatttcccaccattcattaaaaaaaatcgcatgtaattatttacaatttgtttaagcgaaacaaacattgttttgtgtaaattgccttttatttatatactgaaagtataactaacaggttgcacactcgattttcagttcacattaaacgacaccagtgtgcagcacgcttgattggcgaggggaaatttgtggaaaaattaagttcatttagagacagacgccggcattgcaaatatgtccaaaacagatacagctgccgtggaggcaaccgaagagaactcgaacgagacgacttcagatgcggccaccagttcatccggtgaaaaggaggctgagttcgacaacaaaatcgaggctgatcgcagtaggcgctttgatttcctgctaaagcagacggagatattcacccacttcatgactaacagcgctaagagtcccacgaagcctaagggtagacccaagaagatcaaagacaaggacaaggaaaaggatgtggccgatcatcgtcatcgcaagacagagcaggaggaggatgaggagttgctggcggaagactcggccaccaaggagatctttcgcttcgatgcctcacccgcctacatcaaaagtggagagatgcgtgactaccagattcgcggtcttaactggatgatttcgctttacgaaaatggtatcaatggaattctggccgatgaaatgggtctaggaaagaccctgcagaccatatctctgctgggttacctcaagcatttcaaaaatcaagctggaccacacatcgtcatcgtgccaaagtcaacgcttcagaattgggtaaatgagtttaaaaagtggtgtccttccctcagagccgtctgccttattggtgaccaggacacccgtaacaccttcattagagatgtgctcatgcctggcgagtgggacgtttgcgtgacctcctatgagatgtgtatccgcgagaagtctgtattcaagaagttcaactggcgctatttggtcatcgacgaggcgcatcgtatcaagaacgagaagtcgaagctgtcggagattctgcgagagtttaagaccgctaatcgtctacttatcacgggtactccgctgcagaataacctccacgagctgtgggccctgcttaatttcctgctgcccgatgtgtttaattcgtcagaggattttgacgaatggttcaacacgaacacctgcctgggtgacgatgcattgattacgcgtttgcatgccgtgctgaaacctttcctgctccgtcgtctaaaggccgaagtggagaagcgtctgaagccgaagaaggagatgaaaatatttgtgggtctatccaagatgcaacgcgactggtacaccaaggtgctgcttaaggacattgatgtagtgaacggtgctggcaaagtggagaagatgcgactgcagaacatccttatgcagctccgcaagtgcaccaaccacccatatttgtttgatggcgccgagcccggtccgccatacaccacggacacgcatttggtgtataactccggaaagatggctattctggacaagctgctgcccaagctccaagagcagggatcgcgtgtgttgattttctcacaaatgacgaggatgttggatatcctcgaggactactgtcactggcgcaactacaactattgccgcctggatggtcagacgccgcacgaagatcgtaacaggcagattcaggaatttaacatggacaacagcgccaagtttctcttcatgttgtccacccgagccggtggtttgggtatcaatttggctaccgctgatgttgtcatcatttacgactcggattggaatcctcaaatggatttgcaagctatggatcgtgctcatcgtattggtcaaaagaagcaagtgcgcgttttccggctgatcaccgaaagtacagtggaggagaagatcgtggagagagcagaggtcaagctccgtctggacaagatggtcatccaggggggcagattggttgacaaccgctccaatcagttgaacaaggatgaaatgcttaatataatccgttttggagctaaccaagtgttcagctctaaggagacagacattaccgatgaggacatcgatgttattttggagcgcggtgaggccaagacggccgagcaaaaggcagcactggacagtctgggcgagagttcgctgcggacgttcacaatggacacaaacggcgaggcaggaacttcttccgtatatcaattcgagggtgaggattggcgcgagaagcaaaagctaaatgcgctgggcaactggatcgagccaccgaagcgtgaacgcaaagccaactatgctgtggatgcctatttccgcgaggctctccgtgtctccgaacccaaggcaccgaaggctccccgcccacccaagcagcctatcgttcaggactttcagttcttcccaccccgtctgtttgagctgctcgaccaggaaatctactatttccgcaagactgttggttacaaggtgcccaagaacacggaactaggatcggatgccaccaaagtgcagcgcgaggagcagcgcaagatcgatgaggcagagccgcttaccgaggaagagatccaggagaaggagaatctactctcacagggtttcactgcctggaccaagcgcgatttcaaccagttcatcaaggctaacgaaaagtacggtcgggatgatattgacaacattgccaaggacgtggagggcaagactccggaggaggttatcgagtacaacgccgtgttttgggagcgatgcactgagttgcaggatattgagcgaataatgggacagattgagcgtggagagggcaagattcaacggcgattgtctattaagaaggctttggatcaaaagatgtcgcggtatcgcgcccccttccatcagttgcggctgcaatatggtaataacaagggcaagaattacactgaaatagaggatcgctttctggtatgcatgcttcacaagttgggctttgacaaggagaatgtctacgaagagctgcgagcggctataagagcttctccgcaattccgctttgactggttcatcaaatctagaaccgctttggagctacagcgtcgctgcaacacgttgattacccttattgaacgtgaaaacattgagctggaagagaaagaacgcgccgagaaaaagaaaaaggcaccaaagggcagcgtgtccgctggaagtggaagtgccagctcgaacactccagcacccgcgccccaaccgaaggccagtcaaaagcggaagagcgaggtggtggcaaccagttccaactcgaaaaagaagaagaagtaaagcgacaaagcaaacagatatttttctgagattcggctctacactcagcactaggcagttaaatagttaagacaagcgattacttaaacatattttactctatatagttaatagttcatatctcacgccggaagcaatatcacaccaaccccacccccaaaatctgaagtttttttaaacacccgcctacacatccgactacattactattgcgtgccgctgtattctattccaaataattgtattgtgttctaagactataatcattatatttatataaatcaacacagc

SEQ ID NO: 125 - protein, 406 aa, Homo sapiens
  SNX6
MMEGLDDGPDFLSEEDRGLKAINVDLQSDAALQVDISDALSERDKVKFTVHTKSSLPNFKQNEFSVVRQHEEFIWLHDSFVENEDYAGYIIPPAPPRPDFDASREKLQKLGEGEGSMTKEEFTKMKQELEAEYLAIFKKTVAMHEVFLCRVAAHPILRRDLNFHVFLEYNQDLSVRGKNKKEKLEDFFKNMVKSADGVIVSGVKDVDDFFEHERTFLLEYHNRVKDASAKSDRMTRSHKSAADDYNRIGSSLYALGTQDSTDICKFFLKVSELFDKTRKIEARVSADEDLKLSDLLKYYLRESQAAKDLLYRRSRSLVDYENANKALDKARAKNKDVLQAETSQQLCCQKFEKISESAKQELIDFKTRRVAAFRKNLVELAELELKHAKGNLQLLQNCLAVLNGDT

SEQ ID NO: 126 - DNA, 1969 bp, Homo sapiens
  SNX6
cgggtcgacccacgcgtccgcgcctcggagcaaccatgatggaaggcctggacgacggcccggacttcctctcagaagaggaccgcggacttaaagcaataaatgtagatcttcaaagtgatgctgctctgcaggtggacatttctgatgctcttagtgagcgggataaagtaaaattcactgttcacacaaagagttcattgccaaattttaaacaaaacgagttttcagttgttcggcaacatgaggaatttatctggcttcatgattcctttgttgaaaatgaagactatgcaggttatatcattccaccagcaccaccaagacctgattttgatgcttcaagggaaaaactacagaagcttggtgaaggagaagggtcaatgacgaaggaagaattcacaaagatgaaacaggaactggaagctgaatatttggcaatattcaagaagacagttgcgatgcatgaagtgttcctgtgtcgtgtggcagcacatcctattttgagaagagatttaaatttccatgtcttcttggaatataatcaagatttgagtgtgcgaggaaaaaataaaaaagagaaacttgaagacttctttaaaaacatggttaaatcagcagatggagtaatcgtttcaggagtaaaggatgtagatgatttctttgagcacgaacgaacatttcttttggaatatcataaccgagttaaggatgcatctgctaaatctgatagaatgacaagatcccacaaaagtgctgcagatgattacaatagaattggttcttcattatatgctttaggaactcaggattctacagatatatgcaagttttttctcaaagtttcagaactgttcgataaaacaagaaaaatagaagcacgagtgtctgctgatgaagacctcaaactttctgatcttttaaaatattacttaagagaatctcaagctgctaaggatctcctgtatcgaaggtctaggtcactagtggattatgaaaatgctaataaagcactggataaagcaagagcaaaaaataaagatgttctacaggccgaaacttcccaacaattatgttgtcagaaatttgaaaaaatatctgagtctgcaaaacaagaacttatagattttaagacaagaagagttgctgcattcagaaaaaatttagtggaactggcagagttagaactgaagcatgcaaagggtaatctacagttgctgcagaactgcctggcagtgttaaatggagacacataagccacactccgccttcctgttaaaaagggctgccttccttcaaattttatttttgttttcttaatgatgttaagcatttatgctcactggaaacaaacaaaaagcagctgaaaaagtgcatcaactcctctttttctgagaaacatggagcagcgcacgcccaggcgatgccagtctgtgtgccgtgatgccgcactgtgttccccatgacagtggtccatcatcgtgcactcgtcatactcagaagtccaaagttcattcttctttaaagtagcctctataactctgtttattttataaatagtattccttatggctgccactcttatttacctttaaataatttctgaaatttaaccttttcagaatgcattgttgaaacaagataaagattgccttttttgaattttttaaattttgtttttaaaagcatataccaccttagttcattcatgtatcctggtaaagcatcttaatcagacttatttttaattactgaatatttcttagacgttttgggacagattttatgtaatctttataagtatgatttctgaagaaaagcaaatgcattagtatgtttgccttaaacttgtagactaaaccaagtattgtaaaataaacagcgataacagtgatagtttttaactctatggtcattgtatcactctggaaaatgtggagtagctgtaataaatctactcctgtattat

SEQ ID NO: 127 - protein, 140 aa, Homo sapiens
  Profilin II
MAGWQSYVDNLMCDGCCQEAAIVGYCDAKYVWAATAGGVFQSITPIEIDMIVGKDREGFFTNGLTLGAKKCSVIRDSLYVDGDCTMDIRTKSQGGEPTYNVAVGRAGRALVIVMGKEGVHGGTLNKKAYELALYLRRSDV

SEQ ID NO: 128 - DNA, 1693 bp, Homo sapiens
  Profilin II
gaagggctcgaagatggccggttggcagagctacgtggataacctgatgtgcgatggctgctgccaggaggccgccattgtcggctactgcgacgccaaatacgtctgggcagccacggccgggggcgtctttcagagcattacgccaatagaaatagatatgattgtaggaaaagaccgggaaggtttctttaccaacggtttgactcttggcgcgaagaaatgctcagtgatcagagatagtctatacgtcgatggtgactgcacaatggacatccggacaaagagtcaaggtggggagccaacatacaatgtggctgtcggcagagctggtagagcattggttatagtcatgggaaaggaaggtgtccacggaggcacacttaacaagaaagcatatgaactcgctttatacctgaggaggtctgatgtgtaagcagcctctccccatctacctagcaactgtcttcatcaacaaccctaattatggtcacaatgctaccaaactgtagatggtagctaatttttctttacctattttctaatgtcatgattcctgtttgcccaatggatcatttgtatgttaaccactgtatgtaaccaacccttatctggcaacataattgcagcacaataatgatttgcatgataccttgaaattggggggagggggcatgccaagttgggcatcactttgtcttagcaattaatgggatattgattactaaaataagttaatattaagcaaggtgccggttgtacaatctctgatcagtgtcttttcagcactttgagcatttacttggctcatttagtcttccttttgtagcgcatggttgggaggaaaaagtgcatgcatcattccttcactcttctctttttcccgcccccccctcccttcgcacataggcatttggtttgcttccatctttttttatgcagtgcctgtttttttttaaccaattaaaatcccttttgttgatgagctattgagagctgcagtagtttgcttttagtattgttgttgcacttgagcagagacaaacctttattcatagtgtctacaggacatatgaagagtgcaatggcaaaacaagagcaaaaagcacttcctcccatgaccttacagtaaccatactgattgaatccccagggacattccatcattgcaatagctcagatttttcttcctttttctttgcacaccagctctactctttagtaaaattgtaaaaggctgccattatggacattaggtatcccaacataaccatctggagtgtgtccagtttgttcttcataggaccaatttttatttgcagcttgagtttttatatgaagttgcattattgtggacttggctgtccttgaatttttttcatatgtattctgtgccatactattgttaaaatgaactgttgctattgtgagatggattttaactgacctattaagggtttctttcgaatggcactactttagggacattctagtatttgcttctattgtttgggccttgtggataatgtacagatttaaaaacaaatcttgttgctgatttgtccatttctttccctgcactttgttacatctgggatacagtctaactcatctgatttaatatgcatttaaaaaaatgccataactattaaacaccttgtttacagacagatgaaataaatttattccaacc

SEQ ID NO: 129 - protein, 442 aa, Mus musculus
  Testican
MPAIAVLAAAAAAWCFLQVDSRHLDALAGGAALNNANFLDNDQWLSTVSQYDRDKYWNRFRDEVEDDYFRNWNPNKPFDQALDPSKDPCLKVKCSPHKVCVTQDYQTALCVSRKHLLPRQKKGNVAHKHWLGPSNLVKCKPCPVAQSAMVCGSDGHTYTSKCKLEFHACSTGKSLNSLCDGPCPCLPEPEPLKPKAEKSACTDKELRNLASRLKDWFGALHEDANRVIKPTSSDGAQGRFDTSILPICKDSLGWMFNKLDMNYDLLLDHSEINAIYLDKYEPCIKPLFNSCDSFKDGKLSNNEWCYCFQKPAGLPCQNEMNRIQKLSKGKSLLGAFIPRCNEEGYYKATQCHGSTGQCWCVDKYGNELAGSRKQGTVSCEEEQETSGDFGSGGSVVLLDDLEDERDVGPKDKEGKLRVRTRAVREDDEDEDDDKEDEVGYIW

SEQ ID NO: 130 - DNA, 4343 bp, Mus musculus
  Testican
gtgggctcacaaagcggccggacgcgcggcggcggcaggtgcgcaagggaacgagccgggcatcagccttcccagccaccgcggtacaggaaccccagcaactcgggcgccgggactcgggcgggctcccaagatgccagcgatcgcggtgctcgcggcggccgccgcggcgtggtgcttcctccaagtggacagccggcacctggacgcgctggccggtggcgcggccctcaacaacgccaatttcctagacaatgaccagtggctgagcactgtctcccagtatgaccgtgacaagtactggaaccgcttccgagatgaagttgaggatgactatttcagaaactggaatcccaacaagcccttcgaccaagccctggacccatccaaggacccctgcctgaaggtgaaatgcagcccgcacaaagtatgtgtgacccaggactaccagacggctctgtgtgtcagccgcaagcacctgttgccaaggcagaagaagggcaatgtggctcacaaacactggcttggaccttccaatctggttaagtgcaagccttgccccgtggcgcagtcagcgatggtctgcggctctgacggccacacgtacacgtccaagtgcaagttggaattccacgcttgttctacaggcaaaagcctcaactccctctgtgatgggccctgtccgtgtctgcctgagcctgagccactgaagcccaaagcagagaagagtgcctgcacggacaaggagctgcggaacctcgcctcccggctgaaggactggttcggggctcttcatgaggacgccaatagagtcatcaagcctaccagctctgatggagcccaaggcaggtttgacaccagcatcttacccatttgcaaggactccttgggttggatgttcaacaagttggacatgaactatgacctgttgctggaccactcagagatcaatgccatctacctagacaaatatgagccctgcatcaagcctctcttcaactcgtgcgactccttcaaggacggcaaactctccaacaatgagtggtgttactgcttccagaagccagcgggtctcccttgccagaatgaaatgaacagaattcagaagctaagcaaggggaaaagcctactgggggccttcatccctcgatgtaacgaggagggctactacaaagccacacagtgccacggcagcacggggcagtgctggtgtgtggataaatatgggaacgagctggccggctccaggaaacagggcactgtaagctgcgaagaggagcaggaaacctccggggacttcggcagtggaggctccgtggtcctgctggatgacctagaggatgagcgggacgtgggaccaaaggacaaagaagggaagctgagggtgcgcacccgggccgtgcgggaagatgatgaggatgaagatgacgacaaagaagatgaggtcggctacatatggtagtgcccacgaggaagaggacacacttttggcacagatctgcaagtcgtttcctttgcctgcatttgtatctaagactccgaggcaccggggtctcttctccactgttgatctctgaacggggcctgaggtttggaagaccctcttcccagagtgactgaatttgcatacggttgtgtgggagaaaggatgttatttttgttccttgttttcgttttcattggatgagaggacaggctggcttagttaaagccgcctcctctccctgtgaggttttcgcaactagcatgtgatttgtgtggaatccaacagtgcggggagccccaccctctcaagcgtcaaagaccctctctgattacccacgtcggtggttcctacagcatggttcccagcgtcttatgatgtctgcgtgcttttctcgtgtcctgtagatgttgtggaaaacataccaggctgtcccttttccctgtctctaccacctctggtgttgattattaaaaattaattttcatgtcactgtatctgacttcctacaaacgacagccttaattcagtccaagtccctttggagaattcattttctttcttaaaaaaaataagatctcgacacccccccccccctgcgcccaaaggtgactgtgcttgcatgacttgcatacacacacctttcagtctagtgtctggttgtataccaaaaacaccttagataagcaatggcttttagtcagttgctccagaccgagaacacaaaccggggtatgaaattcctcttagagtccggtttgcactagctcttcgtgtgtgtgtgtagcctgcatcccggggaggctcttctatgcggtctcagagtgactggaagcctttttgatttggatgagcctccatttgcctaaatgtgtttttacccacagaagccatgcaattcccacgtgggcagcttcacaagccatttcttcacttccgcgcacagctcccctcaggatacagtgtacccacctgcggcagcttccttccctatccacccaagggctttttcctaccgtgttccccactgagcccctgctccccaagaagacagcatcattataaagcttagaagaaaatttacccttcttcagtgtctcctttgaccccctttctatccacaaatcatgacccagggtatgagactttaaaggtttctcgtgttcccccattatttactagggacccccaatggaagcccagaaagagattcctagtagcacaagaggctagtctcctcatcagcagccatctccccgacacatgctgaccttagttgacacacggctgaggccattttactgtttgtcctgagagctcgttattggcatctggtttcactagtgatatcatctcaatacttttcagatttctttcatacaagtaccaaacagcaatcttcagtgcgggccccgttcagctcagggccaatccccagctctgtcttcttgcttcctgcctagctccttgccctaaccagccacagcctgccagacacactctcttcatggtccttgccttcccccatcctgagttttagccagtccacaagacagatccatcaactcaggctacaaaggtatttggttaaaccgagatcagggagcagagccctaaactggctttctgtatttaggaagccacctacaattcgaattccccttcttgaataggacaggcaaagtgacatcagccctcttgggaaatgaatatacccggtgccctttacccctggcctgggatacacacgcagagccagggtgctgagattctgtgtgcttcctccttatggagatgggaacctgctttggaatctcagtgccatcccccccgcccccaccccctattttgtttgtttttttcttcccattctcaaaatggatcatcctttagaaaacaggtgcttaatcacagctaaattgtaatagaatacattaaaaagacatattagaaatctcagtttaggccatccatataagccattgttgttatttcctatgagcttagggggaaaaaaaacatgcacaagagaacaaattaacatggcaaattgatttctctctgagaaacttctaggaacccaatgagccacttactttgtctaattatcttatgacaagtgtcacattaagatgacacttagaagtcctcaacattatcttaatggtgaagaagagtactcaggaggcaattcccaggaaggtaatgagatgtcatttccagagacattccaagaagatattttgattcattaaaatattaaatcaaaagccctcctacgtgtggagcccacatcaacaagacaggccagtgccgcttctcatggccccactttgggttttaaagatggctatttataatggtactttaaagttagacttttgttctgtttcctgagaaagagtgcttccactggtcttctggaaggaccctttcagtctaatcatcaggcgagcatatgagactttttaagcatatgcggctgtaatgataaccacttgcttaggcaggcactgagctgagtccccacttagctttagaaaaccttcagttgattctgttactctaattctacaaactgttcttactaacattcctgtgacatccagtttaaaccctagaattctcttccaccagggttcattgtctgccatatgactatgtttctacagatattctcagcatgaggatggcttcacatggctttctctcagtactccctttatgcccacgaccctgtgtatacaccaaatgatgatttgtctgtccaggtctaccctctgcttgtcccagaacgccattgacattgactttggtttggtttttatcttgaccacactgtacagtaacatccaagagc

SEQ ID NO: 131 - protein, 358 aa, Mus musculus
  E124
MVWGHFPLAVFDSLGSGEMADSVKTFLQDLGRGIKDSIWGICTISKLDARIQQKREEQRRRRASSLLAQRRPQSVERKQESEPRIVSRIFQCCAWNGGVFWFSLLLFYRVFIPVLQSVTARIIGDPSLHGDVWSWLEFFLTSIFSALWVLPLFVLSKVVNAIWFQDIADLAFEVSGRKPHPFPSVSKIIADMLFNLLLQALFLIQGMFVSLFPIHLVGQLVSLLHMSLLYSLYCFEYRWFNKGIEMHQRLSNIERNWPYYFGFGLPLAFLTAMQSSYIISGCLFSILFPLFIISANEAKTPGKAYLFQLRLFSLVVFLSNRLFHKTVYLQSALSSSSSAEKFPSPHPSPAKLKAAAGH

SEQ ID NO: 132 - DNA, 2119 bp, Mus musculus
  E124
tgaacccgggacgcgaaaggcggcaggggcaggcctggcggcggcgcgcgggactcaggctttccccaggccctccatgatgaatggtttgggggcacttccctctagctgtatttgatagtctgggcagtggagagatggctgacagtgtcaaaacctttctgcaggaccttggcaggggaatcaaagactccatctggggcatctgtaccatctcaaagctagatgctcggatccagcagaagagagaggaacagcgtcgaagaagggcaagtagcctcttggcccagaggagaccccagagtgtagagcggaagcaagagagtgaaccacgtattgttagtagaattttccagtgttgtgcttggaatggtggagtattctggttcagtctcctcttgttttatcgagtgtttattcctgtacttcagtcagtaacagcccggattattggagatccatcacttcatggagatgtttggtcatggctggaattcttcctcacatcaattttcagtgctctttgggtgctccccctgtttgtgcttagcaaagttgtgaatgccatttggttccaagatatagctgacttggcatttgaagtatcagggaggaaacctcatccattccccagtgtcagcaaaataattgctgacatgctcttcaaccttttgctacaggcacttttccttattcaggggatgtttgtgagtctcttccccatccatcttgtgggtcagctggttagtctgctgcatatgtctcttctctattcactgtactgctttgagtaccgttggttcaacaaaggaattgaaatgcaccagcgattgtcgaacatagaaaggaattggccttactactttgggtttggcttgcccttggctttcctcacagcaatgcaatcctcctacattatcagtggctgcctcttttctatcctgtttcctttattcatcatcagcgccaatgaagcaaagactcctggaaaagcatatcttttccagttgcgcctattctccttggtggtctttttaagcaacagacttttccacaagaccgtctacctgcagtcagccctgagcagctcgtcctctgcagagaaattcccttcgccacatccttctccggccaaactgaaagctgctgcaggccattgagccctgctgtcaaaggggtgggtgggactgggtggaggatgtggcagctcttttctctgttttcctccccctgccgtggaaggcagaacccactgccaagggccctctgcatagtcccttgtctttgaattggaatcttcctgactccagtatatggatttttaccaccaccctaggtctgtaaggaccagttttccagctgtttttttagcacttgccagctcctgtgcctggactgattgatttgagtactttttttcccctttccttgtgtcatttaccctcccacttcctcctgccttccagcacccctggatgaatgggctttgtaattttaactgttgtattttgtgaatttgttgttactgtttttctgtgaagcacatacatgtatgtgggaggtaaaggggcattccagttgctccagtcactccctctatagccatactgtcttgttttctgtaactcaggttaggttttggtctctattctctgctgcagaaaaggaaagaaggagtgggggaaatggagcctgaagagttggggcagatagacctcagccaaactggctgggttttgaggagtcatgttctttcttcccttgaaggggaaagagttttttccactggtccatttaaagtttcccagctatggggtggtaccagttctggacaagtgccactgcatcatagtatgctcggagaatctgaaccttactctgaagatgaaatttactgttgccactgccaggtcacactggtgttttaaggaatactgggtgcttcatataggaactgaaggggtaaacttactaaaccattcaacctgtgattggtgatgttttcctgtcattttaagagtcgacacatgggtgggggggcagatgtaaaaaaacttgtacaattttaaaatatcacaattaaacgtgagctggtttcccaaaaaaaaaaaaaaaaaaa

SEQ ID NO: 133 - protein, 845 aa, Rattus norvegicus
  Matrin 3
MSKSFQQSSLGRDSQGHGRDLSAAGIGLLAAATQSLSMPASLGRMNQGTARLASLMNLGMSSSLNQQGAHSALSSASTSSHNLQSIFNIGSRGPLPLSSQHRGDTDQASNILASFGLSARDLDELSRYPEDKITPENLPQILLQLKRRRTEEGPTLSYGRDGRSATREPPYRVPRDDWEEKRHFRRDSFDDRGPSLNPVLDYDHGSRSQESGYYDRMDYEDDRLRDGERCRDDSFFGETSHNYHKFDSEYERMGRGPGPLQERSLFEKKRGAPPSSNIEDFHGLLPKGYPHLCSICDLPVHSNKEWSQHINGASHSRRCQLLLEIYPEWNPDNDTGHTMGDPFMLQQSTNPAPGILGPPPPSFHLGGPAVGPRGNLGAGNGNLQGPRHMQKGRVETSRVVHIMDFQRGKNLRYQLLQLVEPFGVISNHLILNKINEAFIEMATTEDAQAAVDYYTTTPALVFGKPVRVHLSQKYKRIKKPEGKPDEKFDQKQELGRVIHLSNLPHSGYSDSAVLKLAEPYGKIKNYILMRMKSQAFIEMETREDAMAMVDHCLKKALWFQGRCVKVDLSEKYKKLVLRIPNRGIDLLKKDKSRKRSYSPDGKESPSDKKSKTDGAQKTENPAEGKEQEEKSGEDGEKDTKDDQTEQEPSMLLESEDELLVDEEEAAALIESGSSVGDETDLANLGDVSSDGKKEPSDKAVKKDASATSKKKLKKVDKIEELDQENEAALENGIKNEENTEPGAESAENADDPNKDASDNSDGQNDENKEDYTIPDEYRIGPYQPNVPGGIDYVIPKTGFYCKLCSLFYTNEEVAKNTHCSSLPHYQKLKKFLNKLAEERRQKKES

SEQ ID NO: 134 - DNA, 3761 bp, Rattus norvegicus
  Matrin 3
  misc_feature 6: n is a or g or c or t
tdatdnactgagagaggtatctctccttttccctctcccttccctaagagttgtctgctggttctcagcttgaagaagattctacagtccttattgatcctttttcttggcgttaccatttttgaagcaaagttgacctagctttctagtttgagctttctttttggccgtcttttaaaacatttttttttttgatctataaaatagacaagagatagttctacaatgtccaagtcattccagcagtcatctctcggtagggattcacagggtcatgggcgtgacctgtctgcagcaggaataggccttcttgctgctgctacccagtctttaagtatgccagcatctcttggaaggatgaaccagggtactgcacgccttgctagcttaatgaatcttggaatgagttcttcattgaatcaacaaggagctcatagtgcactgtcttctgctagtacttcttcccataatttgcagtctatatttaacattggaagtagaggtccactccctttgtcttctcaacaccgtggagatacagaccaggccagtaatattttggccagctttggtctgtctgctagagacttagatgaactgagtcgttatccagaggacaagattactcctgagaacttgccccaaattcttctacagcttaaaaggaggagaactgaagaaggccctacattgagttatggtagagatggcagatctgctacacgggagccaccatacagagtacctagggatgattgggaagaaaaaaggcattttagaagagatagttttgatgatcgtggtcctagtctcaacccagtgcttgattatgaccatggaagtcgttctcaagaatctggttattatgacagaatggattatgaagatgacagattaagagatggagaaaggtgtagggatgattctttttttggtgagacctcgcataactatcataaatttgacagtgagtatgagagaatgggacgtggtcctggccccttacaagagagatctctctttgagaaaaagaggggcgctcctccaagtagcaatattgaagacttccatggactcttaccgaagggttatccccatctgtgctctatatgtgatttgccagttcattctaataaggagtggagtcaacatatcaatggagcaagtcacagtcgtcgatgccagcttcttcttgaaatctacccagaatggaatcctgacaatgatactggacacacaatgggtgatccattcatgctgcagcagtcaacaaacccagcaccgggaattctgggaccgccacctccttcatttcatcttggaggaccagcagttggaccaagaggaaatctgggtgctggtaatggaaacctacagggaccaagacacatgcaaaaaggcagagtggaaaccagccgagttgttcacattatggattttcagcgaggaaaaaacttgagataccagctattacaactggtagaaccatttggagtcatttcaaatcatctgattctaaataaaattaatgaggcatttattgaaatggcgaccacagaagatgctcaggctgctgtggattattatacaactacaccagcattagtgtttggcaagccagtgagagttcatttatcccagaagtataagagaataaagaaacctgaaggaaaaccagatgagaagtttgatcaaaagcaagaacttggacgtgtgatacatctcagcaatttacctcattctggctattctgacagtgctgtcctcaagcttgcagagccttatgggaaaataaaaaattatatattgatgaggatgaaaagtcaggcttttattgagatggaaaccagagaagatgcaatggcaatggttgaccactgtctaaagaaggcactttggtttcagggaagatgtgttaaagttgacttgtctgagaaatataaaaaactggtgctgaggattcctaacagaggcattgacttactgaaaaaagataaatctcggaaaagatcctattctccagatggaaaagaatctccaagtgataagaagtccaaaactgatggtgctcagaagactgagaatccagctgagggtaaagaacaagaagagaagtcgggtgaggatggtgagaaagacaccaaggatgaccagacagaacaggagcccagtatgcttcttgaatctgaagatgaattgcttgtcgatgaggaagaagctgcagcactaatagaaagtggaagctcagtgggtgatgagactgatcttgctaatttaggggatgtatcttctgatgggaaaaaggagccttcagataaagctgtgaaaaaagatgcaagtgcaacatccaagaaaaaacttaaaaaggtggacaagattgaggaacttgatcaagaaaatgaagctgcattggaaaatgggattaaaaatgaggaaaatacagaaccaggtgctgaatctgctgagaatgctgatgatccaaacaaagacgcaagtgataattcagatggccaaaatgatgagaacaaggaggactatacaattccagatgagtatagaattggaccatatcagcctaatgttcctggtggtatagactatgtgatacctaaaacagggttttactgtaagctgtgttcactcttttatacaaatgaagaagttgcaaagaatactcattgcagcagccttcctcattatcagaaattaaagaaatttctgaataaattggcagaagaacgcaggcagaagaaggaaagttaagatgtacaagaagcttttatttcaaagaaaacaatggttctttgattttaatgttaaccttttttaaatacaatactgatagttagaaaactactgtgactcttttgttttagtggaaaataatagatgtctgttcatgtgtttaagtgttatagcaaaaagtacacatacggttaagttaatgaaaaagtttttgtttcatcagtgacaacagacaaaagtacttcctagagatttgctgttgtaagtaagctatggaaaaacaacttgcaccactaagagaaagataacatagaaccattcagaaaactgaaatttagtagtttaaggcttcaaagaaatgtcaacattttgattccattcaataaagtacaaaaccaatgtattttttattacttttcatctgaaacagtccacattttaatctgagccttgcagacttttcatttgtgacgtttgtaagctgtttcggttgcattgcatttttagagaacttaattaacgtgagaattcaattgcaggtgcagttttcttttaatgttcatgctgtttagatgataagatatattaagtaattggctttagatttgtaatttttttcctctgagttcctgctaggttttgtattgtagtagtcaatgttatttcagtgaaatgtaaaaatattaccgttctctttgaccagtattaatttcttgagaacctattccttgtcacttgaatcctgtagctgtcaaacatctccggtataagcaacatttgatttttgaagtgtgtaaaccatctatattttcaagatgtaattttacatttctgcattttaaaagtttggccataattctagaagcacgttctaattatgtacctacacatgtgacctatgtgagcagaaatttgcatgtataatctgtgtttacttgtaactctctggttatatactgcttatatctgtggattcaagttactgaagtgaataccaataaaaaaaaaaacaagct

SEQ ID NO: 135 - protein, 1523 aa, Homo sapiens
  KIAA0287
VQTLGGWVQPETRTKEEIIELLVLEQYLTIIPEKLKPWVRAKKPENCEKLVTLLENYKEMYQPEDDNNSDVTSDDDMTRNRRESSPPHSVHSFSGDRDWDRRGRSRDMEPRDRWSHTRNPRSRMPPRDLSLPVVAKTSFEMDREDDRDSRAYESRSQDAESYQNVVDLAEDRKPHNTIQDNMENYRKLLSLGVQLAEDDGHSHMTQGHSSRSKRSAYPSTSRGLKTMPEAKKSTHRRGICEDESSHGVIMEKFIKDVSRSSKSGRARESSDRSQRFPRMSDDNWKDISLNKRESVIQQRVYEGNAFRGGFRFNSTLVSRKRVLERKRRYHFDTDGKGSIHDQKGCPRKKPFECGSEMRKAMSVSSLSSLSSPSFTESQPIDFGAMPYVCDECGRSFSVISEFVEHQIMHTRENLYEYGESFIHSVAVSEVQKSQVGGKRFECKDCGETFNKSAALAEHRKIHARGYLVECKNQECEEAFMPSPTFSELQKIYGKDKFYECRVCKETFLHSSALIEHQKIHFGDDKDNEREHERERERERGETFRPSPALNEFQKMYGKEKMYECKVCGETFLHSSSLKEHQKIHTRGNPFENKGKVCEETFIPGQSLKRRQKTYNKEKLCDFTDGRDAFMQSSELSEHQKIHSRKNLFEGRGYEKSVIHSGPFTESQKSHTITRPLESDEDEKAFTISSNPYENQKIPTKENVYEAKSYERSVIHSLASVEAQKSHSVAGPSKPKVMAESTIQSFDAINHQRVRAGGNTSEGREYSRSVIHSLVASKPPRSHNGNELVESNEKGESSIYISDLNDKRQKIPARENPCEGGSKNRNYEDSVIQSVFRAKPQKSVPGEGSGEFKKDGEFSVPSSNVREYQKARAKKKYIEHRSNETSVIHSLPFGEQTFRPRGMLYECQECGECFAHSSDLTEHQKIHDREKPSGSRNYEWSVIRSLAPTDPQTSYAQEQYAKEQARNKCKDFRQFFATSEDLNTNQKIYDQEKSHGEESQGENTDGEETHSEETHGQETIEDPVIQGSDMEDPQKDDPDDKIYECEDCGLGFVDLTDLTDHQKVHSRKCLVDSREYTHSVIHTHSISEYQRDYTGEQLYECPKCGESFIHSSFLFEHQRIHEQDQLYSMKGCDDGFIALLPMKPRRNRAAERNPALAGSAIRCLLCGQGFIHSSALNEHMRLHREDDLLEQSQMAEEAIIPGLALTEFQRSQTEERLFECAVCGESFVNPAELADHVTVHKNEPYEYGSSYTHTSFLTEPLKGAIPFYECKDCGKSFIHSTVLTKHKELHLEEEEEDEAAAAAAAAAQEVEANVHVPQVVLRIQGLNVEAAEPEVEAAEPEVEAAEPEVEAAEPNGEAEGPDGEAAEPIGEAGQPNGEAEQPNGDADEPDGAGIEDPEERAEEPEGKAEEPEGDADEPDGVGIEDPEEGEDQEIQVEEPYYDCHECTETFTSSTAFSEHLKTHASMIIFEPANAFGECSGYIERASTSTGGANQADEKYFKCDVCGQLFNDRLSLARHQNTHTG

SEQ ID NO: 136 - DNA, 5994 bp, Homo sapiens
  KIAA0287
gaggtttgggaggcgcgggagatgtccaccctgggctggtggcgccgccgggcgccgggcgccatgagggtgcgctaggcggctgttcgtgcccgaggctgcgcagcactgaggtgagctttgccttcttgatcttccgtccttcttggagacgactggcgagaggaagagggactaggtccaaacgctaggtggctgggtccagccggagacccgcaccaaggaggagatcatcgagctcttggtccttgagcagtacctgaccatcatccctgaaaagctcaagccttgggtgcgagcaaaaaagccggagaactgtgagaagctcgtcactctgctggagaattacaaggagatgtaccaaccagaagacgacaacaacagtgacgtgaccagcgacgacgacatgacccggaacagaagagagtcctcaccacctcactcagtccattctttcagtggtgaccgggactgggaccggaggggcagaagcagagacatggagccacgagaccgctggtcccacaccaggaacccaagaagcaggatgcctccgcgggatctttcccttcctgtggtggcgaaaacaagctttgaaatggacagagaggacgacagggactccagggcttatgagtcccgatctcaggatgctgaatcataccaaaatgtggtggacctcgctgaggacaggaaacctcacaacacaatccaggacaacatggaaaactacaggaagctgctctccctcggagtgcagcttgctgaagacgatggccactcccacatgacgcagggccactcatcaagatccaagagaagtgcctacccaagcaccagtcgaggtctaaaaactatgcctgaagccaaaaaatcaacccaccggcgggggatttgtgaagatgaatcttcccacggagtgataatggaaaaattcatcaaggatgtgtcacgcagttccaaatcgggaagagcaagggagtcaagcgaccggtcacagagattccccagaatgtcagatgataactggaaggacatttcattgaacaagagggagtcagtgatccagcagcgggtttatgaagggaatgcatttaggggaggctttaggtttaattcaacccttgtttccagaaagagagttcttgaaagaaagaggcgctatcattttgacacagatgggaagggctcgattcacgatcaaaaaggctgtcccaggaagaagccctttgaatgtggtagtgagatgagaaaagccatgagcgtgagcagcctgagcagcctcagctccccctcctttaccgagtcacagccaattgattttggggcaatgccatatgtatgtgatgagtgtgggaggtcgttcagtgtcatctcagaatttgttgagcaccagatcatgcatactagagagaacctctatgagtatggtgagtcctttatccacagtgtggctgtcagtgaagttcagaaaagtcaggttggagggaaacgttttgaatgtaaggactgtggagagaccttcaataagagtgccgccttggctgaacatcggaagattcatgctagaggttatcttgtggaatgtaagaatcaggaatgtgaggaagccttcatgcctagccccacctttagtgagcttcagaaaatatatggcaaagacaaattctacgagtgcagggtgtgtaaggaaaccttccttcatagttctgccctgattgagcaccagaaaatccactttggggatgacaaagataatgagcgtgaacatgaacgtgaacgtgaacgtgagcgcggggaaacctttaggcccagcccagcccttaatgagtttcagaaaatgtatggtaaagagaaaatgtacgaatgtaaggtgtgtggggagactttccttcatagctcatccctgaaagaacatcagaaaatccatactagagggaacccatttgaaaacaagggtaaagtgtgtgaggaaacctttattcctggtcagtcccttaaaaggcgtcagaaaacttacaataaggagaagctctgtgactttacagatggccgggatgccttcatgcaaagctcagagctcagtgagcatcagaaaattcattctcgaaagaacctctttgaaggcagagggtatgagaaatctgtcattcatagtgggccattcactgaatctcagaagagtcatactataacaagacctcttgaaagtgatgaggacgaaaaggcgttcaccattagctctaacccctatgaaaaccagaagattcccactaaggaaaatgtctacgaggcaaaatcatatgagaggtctgttattcatagcttagcctctgtggaagctcagaaaagtcacagtgtagcagggcccagtaaaccaaaagtaatggcagagtctaccattcagagcttcgatgctatcaaccatcagagagttcgtgctggagggaacacctctgaaggaagggaatacagtaggtctgttatccatagcttagtggcttccaaacctccaagaagtcacaatggaaatgaattggtggaatctaatgagaagggagaatcctccatttatatctcagaccttaatgataagcgacagaagattcctgccagagagaacccttgtgaagggggcagtaagaatcgcaactatgaagactctgtcatacagagtgtattccgtgccaaacctcagaaaagtgttcctggagagggatctggtgagtttaagaaggatggcgaattctctgttcccagctcaaatgtccgtgaataccagaaggctcgtgctaaaaagaaatacattgagcataggagcaatgagacctctgtaattcactctctgccttttggtgaacaaacatttcgccctcgagggatgctctatgaatgtcaggagtgtggggagtgctttgctcatagctctgacctcactgagcaccagaagattcatgatagggagaagccctctggaagcagaaactatgaatggtctgtcattcgcagcttggcccctactgaccctcaaacaagttacgcccaagagcagtatgctaaagagcaagcgcggaacaaatgtaaggacttcagacaattttttgctaccagcgaagacctcaacacaaaccagaaaatctatgaccaagagaagtctcatggcgaggagtctcaaggcgagaatactgatggggaggagacccacagcgaggagacccatggtcaggagacaattgaagaccctgtcattcaaggctcagacatggaagaccctcagaaggatgaccctgatgacaaaatctatgaatgtgaggactgtggcctgggctttgtggatctcacagacctcacagaccatcagaaagtccacagcaggaagtgcctggttgacagtcgggagtacacacattctgtaattcacacccattccatcagcgagtatcagagagattacactggagagcagctgtatgaatgtccaaagtgtggggaatcttttattcatagctcattccttttcgagcatcagagaatccatgaacaagaccagttgtattccatgaaggggtgtgatgatggttttattgccctcttgcccatgaagccacggaggaatcgtgctgcagagaggaatcctgctcttgctgggtcggccattcgatgccttttgtgtggacaaggcttcattcatagctctgcccttaatgagcatatgagacttcatagggaagatgatttactggagcagagccagatggctgaggaagctatcattccaggcttagccctcactgagtttcagagaagtcagaccgaagagagactctttgaatgtgcagtctgtggagaatctttcgtcaacccagcagaacttgcagatcacgtaactgttcataagaatgagccctatgagtacgggtcctcctatactcacacctcatttcttactgagcccctcaaaggagctataccattctatgaatgcaaggattgtggtaagtcctttattcatagcacagtcctcactaaacataaggagcttcatctggaagaagaagaagaagatgaagcagcagcagctgcagcagcagcagcccaggaagttgaagccaatgtccatgttccacaagtagttctgaggattcagggcttaaacgtagaggctgctgagccagaagtggaggctgccgagccagaagtggaggctgctgagccagaagtggaggctgctgagccaaacggagaggctgaagggccagatggagaggctgcagagcccattggagaggctggacagccaaatggagaggccgagcagccaaatggggatgctgatgagccagatggtgcaggtattgaagacccagaagaaagagctgaagagccagagggaaaagctgaagagccagagggagatgccgacgagcctgacggtgtgggaattgaagacccagaagaaggtgaagatcaagagattcaggtagaagaaccatactatgactgccatgaatgcacagaaaccttcacttccagcacagcattcagtgaacacctgaaaactcatgccagcatgatcatatttgagcctgcaaatgcctttggggagtgctcaggctacatcgaacgtgccagcaccagcacaggtggtgccaatcaagctgatgagaagtacttcaaatgtgacgtctgtgggcagctcttcaatgaccgcctgtccctcgccagacaccagaatacccacactggctgagggcatggggtaaaggttagaaaaccttcacctaggacttgacccttaccaaaccacagagaatccaaaccaatccatgataatgtcagtaggagacttaaccttagtgtgttacacacctgacttaacatctctaaactcagattgaaaagagaccgaatgtgcagattccacagtcttaagctttccccttcagatgtcagtgtctgcatgtgggaaagccatagcacacatcttacctttccaagtaatcagattgagaaaaccctatgagtattccagactacagagtttgcccaaatcaactgtaaatgacacttgtgtaacgtatatatagtgtttcatgaggtgtatataaaatagcaaattatgacagaacagtgatcacatatatttggatttatatgatatacagttacagtttactctgcagaggtaccttacctggtattctttgaattttttttttttttggaggaggaagagagcaacaaatttgattatatttttaagtgtcttagatcctgagaaagatttattgtgcattatttgaaccctgtcaatatctttttgagtaattgttttgtttcttacccttaaatagtcttgtgaagctgtaggcatgatagataacatggcttttactccttactgtttgaaaagataagtactttagcttctttctgcagccatttcatctgcaccaacactttggaacctaatactgtgtaaggctttacaatatacggattggctttttgtgacccagattgattggttgccacatgttatgtttgttgaagtggttctcatgcaaaaatattacacatttgtgttctgggtttttttttttttttaaccaactcaatatgtgtttgatgatagtgaattgataaaacccgaagcttttccctgtaaatcttacatctttgcctttaaagaatgggttacaaccatcactagatcacagtagtgcctaatgaaggttgagaaccgtaggagaggctctcatgctgtaaataatgttgcaggctaataacctttcatcacttcctttgtgcgcttcctgccttaagtgacaagtagcaacatggcttgggtcccctgtgcagcatcagcttatgctgccacaagtcagtttgcaccctaggtgcccaggagctagtatccttagatctttctatcgctaacttaattctcttcgttatttatctgaccctctaactccatgtctaacttgcatt

SEQ ID NO: 137 - protein, 225 aa, Mus musculus
  Rho-GDI3
MLGLDACELGEQLLELLRLALCARVLLADKDGESTPSDEVLDEIVPEYQAPGKKSMLAIWQLDPGDVSLVKYKQALLGPLPPIMDPSLPNVQVTRLTLLTEQAPGPIIMDLTGDLDALKNQVFVLKEGIEYKVKITFKVNKEIVSGLKCLHHTYRRGLRVDKAIFMVGSYGPRAQEYEFVTSVEEAPRGALARGLYVVRSLFTDDDRLNHLSWEWHLHVCQDWKD

SEQ ID NO: 138 - DNA, 865 bp, Mus musculus
  Rho-GDI3
ccgagcgggcggcggctccgcggcgggccgcggctaccatgctgggcctggacgcgtgtgagctgggggagcagctgttggagctgctccggctggcgctgtgcgcccgagtcctcttggctgacaaggatggggagtcaactccatcagatgaggtgctggacgaaattgtaccagagtaccaggcccctgggaagaagagcatgctggcaatctggcaactggaccccggggacgtgagcttggtcaagtacaagcaggcgctgctgggacccctgccacccattatggaccccagcctgcccaacgtgcaggtgactaggctgacactgctgacggagcaggctccagggcctatcatcatggaccttacaggagacctagatgcactgaaaaaccaggtgtttgtcctgaaggagggcattgaatacaaggtgaagatcaccttcaaggtcaacaaggagattgtcagtggcctcaaatgtctgcatcacacctatcgtcggggactgcgtgtggacaaggccatcttcatggtgggaagctacggccccagagcccaggagtatgaatttgtgacttcagtggaggaagcaccaagaggagcattggcacgtggcctctacgtggtcaggtccctcttcactgatgacgacaggctgaaccacctgtcctgggagtggcacctccatgtctgccaggactggaaggactgaaccccacttggggtctgtattcccaatttcttgtcagttgcagagacctgcaagcattccctagacctcccagttggtgaccagatgtcccccactctctgctgtgtcccccctgcctggtgcctattaaatgttaccttgtcttgcca

SEQ ID NO: 139 - protein, 758 aa, Homo sapiens
  Motor protein
MLRACQLSGVTAAAQSCLCGKFVLRPLRPCRRYSTSGSSGLTTGKIAGAGLLFVGGGIGGTILYAKWDSHFRESVEKTIPYSDKLFEMVLGPAAYNVPLPKKSIQSGPLKISSVSEVMKESKQPASQLQKQKGDTPASATAPTEAAQIISAAGDTLSVPAPAVQPEESLKTDHPEIGEGKPTPALSEEASSSSIRERPPEEVAARLAQQEKQEQVKIESLAKSLEDALRQTASVTLQAIAAQNAAVQAVNAHSNILKAAMDNSEIAGEKKSAQWRTVEGALKERRKAVDEAADALLKAKEELEKMKSVIENAKKKEVAGAKPHITAAEGKLHNMIVDLDNVVKKVQAAQSEAKVVSQYHELVVQARDDFKRELDSITPEVLPGWKGMSVSDLADKLSTDDLNSLIAHAHRRIDQLNRELAEQKATEKQHITLALEKQKLEEKRAFDSAVAKALEHHRSEIQAEQDRKIEEVRDAMENEMRTQLRRQAAAHTDHLRDVLRVQEQELKSEFEQNLSEKLSEQELQFRRLSQEQVDNFTLDINTAYARLRGIEQAVQSHAVAEEEARKAHQLWLSVEALKYSMKTSSAETPTIPLGSAVEAIKANCSDNEFTQALTAAIPPESLTRGVYSEETLRARFYAVQKLARRVAMIDETRNSLYQYFLSYLQSLLLFPPQQLKPPPELCPEDINTFKLLSYASYCIEHGDLELAAKFVNQLKGESRRVAQDWLKEARMTLETKQIVEILTAYASAVGIGTTQVQPE

SEQ ID NO: 140 - DNA, 2690 bp, Homo sapiens
  Motor protein
cccggacacacgcaagcacgcctccacttaactcgcgccgccgcggcagctcgagtccaccagcagcgccgtccgcttgaccgagatgctgcgggcctgtcagttatcgggtgtgaccgccgccgcccagagttgtctctgtgggaagtttgtcctccgtccattgcgaccatgccgcagatactctacttcaggcagctctgggttgactactggcaaaattgctggagctggccttttgtttgttggtggaggtattggtggcactatcctatatgccaaatgggattcccatttccgggaaagtgtagagaaaaccataccttactcagacaaactcttcgagatggttcttggtcctgcagcttataatgttccattgccaaagaaatcgattcagtcgggtccactaaaaatctctagtgtatcagaagtaatgaaagaatctaaacagcctgcctcacaactccaaaaacaaaagggagatactccagcttcagcaacagcacctacagaagcggctcaaattatttctgcagcaggtgataccctgtcggtcccagcccctgcagttcagcctgaggaatctttaaaaactgatcaccctgaaattggtgaaggaaaacccacacctgcactttcagaagaagcatcctcatcttctataagggagcgaccacctgaagaagttgcagctcgccttgcacaacaggaaaaacaagaacaagttaaaattgagtctctagccaagagcttagaagatgctctgaggcaaactgcaagtgtcactctgcaggctattgcagctcagaatgctgcggtccaggctgtcaatgcacactccaacatattgaaagccgccatggacaattctgagattgcaggcgagaagaaatctgctcagtggcgcacagtggagggtgcattgaaggaacgcagaaaggcagtagatgaagctgccgatgcccttctcaaagccaaagaagagttagagaagatgaaaagtgtgattgaaaatgcaaagaaaaaagaggttgctggggccaagcctcatataactgctgcagagggtaaacttcacaacatgatagttgatctggataatgtggtcaaaaaggtccaagcagctcagtctgaggctaaggttgtatctcagtatcatgagctggtggtccaagctcgggatgactttaaacgagagctggacagtattactccagaagtccttcctgggtggaaaggaatgagtgtttcagacttagctgacaagctctctactgatgatctgaactccctcattgctcatgcacatcgtcgtattgatcagctgaacagagagctggcagaacagaaggccaccgaaaagcagcacatcacgttagccttggagaaacaaaagctggaagaaaagcgggcatttgactctgcagtagcaaaagcattagaacatcacagaagtgaaatacaggctgaacaggacagaaagatagaagaagtcagagatgccatggaaaatgaaatgagaacccagcttcgccgacaggcagctgcccacactgatcacttgcgagatgtccttagggtacaagaacaggaattgaagtctgaatttgagcagaacctgtctgagaaactctctgaacaagaattacaatttcgtcgtctcagtcaagagcaagttgacaactttactctggatataaatactgcctatgccagactcagaggaatcgaacaggctgttcagagccatgcagttgctgaagaggaagccagaaaagcccaccaactctggctttcagtggaggcattaaagtacagcatgaagacctcatctgcagaaacacctactatcccgctgggtagtgcggttgaggccatcaaagccaactgttctgataatgaattcacccaagctttaaccgcagctatccctccagagtccctgacccgtggggtgtacagtgaagagacccttagagcccgtttctatgctgttcaaaaactggcccgaagggtagcaatgattgatgaaaccagaaatagcttgtaccagtacttcctctcctacctacagtccctgctcctattcccacctcagcaactgaagccgcccccagagctctgccctgaggatataaacacatttaaattactgtcatatgcttcctattgcattgagcatggtgatctggagctagcagcaaagtttgtcaatcagctgaagggggaatccagacgagtggcacaggactggctgaaggaagcccgaatgaccctagaaacgaaacagatagtggaaatcctgacagcatatgccagcgccgtaggaataggaaccactcaggtgcagccagagtgaggtttaggaagattttcataaagtcatatttcatgtcaaaggaaatcagcagtgatagatgaagggttcgcagcgagagtcccggacttgtctagaaatgagcaggtttacaagtactgttctaaatgttaacacctgttgcatttatattctttccatttgctatcatgtcagtgaacgccaggagtgctttctttgcaacttgtgtaacattttctgttttttcaggttttactgatgaggcttgtgaggccaatcaaaataatgtttgtgatctctactactgttgattttgccctcggagcaaactgaataaagcaacaagatg

SEQ ID NO: 141 - protein, 220 aa, Mus musculus
  Phosphatidylinositol transfer protein alpha
MVLLKEYRVILPVSVDEYQVGQLYSVAEASKNETGGGEGVEVLVNEPYEKDDGEKGQYTHKIYHLQSKVPTFVRMLAPEGALNIHEKAWNAYPYCRTVITNEYMKEDFLIKIETWHKPDLGTQENVHKLEPEAWKHVEAIYIDIADRSQVLSKDYKAEEDPAKFKSVKTGRGPLGPNWKQELVNQKDCPYMCAYKLVTVKFKWWGLQNKVENFIHKQEKR

SEQ ID NO: 142 - DNA, 3724 bp, Mus musculus
  Phosphatidylinositol transfer protein alpha
cggaaccggagctccgggcggcgtcggcagaggcgcgggaggtggtgaggccagggcagggcgacaggagcccgcgcggcgaccgcagcgagagcagcggggacagagcagaccacgacgaaggcgcacaggcagcggggccgggccgggccaccgggagagcggccaccgggtagcgggcgggaggccgggctggcagctggcagccgccgagccgcgaagcgacatggtgctgctcaaggagtatcgggtcatcctgcctgtgtctgtagatgagtatcaagtggggcagctgtattctgtggctgaagccagtaaaaatgaaactggtggtggggaaggtgtggaggtcctggtgaatgagccctacgagaaggacgatggcgagaaaggccagtacacacacaagatctaccacttacagagcaaagtacccacctttgttcgaatgctggccccagaaggcgccctgaatatacacgagaaagcctggaatgcctacccttactgcagaaccgttattactaatgagtacatgaaagaagattttctgattaaaattgaaacctggcacaagccagaccttggcacccaggagaatgtgcataaactggagcctgaggcatggaaacatgtggaagctatatatatagacatcgctgatcgaagccaagtacttagcaaggattacaaggcagaggaagacccagcaaaatttaaatctgtcaaaacaggacgcggacctttgggcccgaattggaagcaagaacttgtcaatcagaaagactgcccatatatgtgtgcatacaaactggttactgtcaagttcaagtggtggggcttgcagaacaaagtggaaaactttatacataagcaagagaagcgtctgtttacaaactttcacaggcagctgttctgttggctcgataaatgggttgatctgactatggatgacattcggaggatggaagaagagacgaagagacagctggatgagatgagacaaaaggacccagtgaaaggaatgacagcagacgactagcgccaccgccctttctgcactttttgcaagacagtggtcaacaggaaggcccagcagctccaccctcctgagtggcaggccatcttcggacgcagcctttctgtgctcattcttcaggcaactttcaatcccttactatagctatttctagatgccctttaacattgtgaacaaatagaccgtctggtattataaagcctgtgtgtgcgggagcctgatcctctaagatacatggtgtagctgctgtgtttacagctcatcctctctccactgtgctctgacccatttctgtatgccctccccttttatttccaagtgatggtctcagtcttcccaatgagctgccttttgtgatgtgattatttaagctcatttatttcagccttgggataaactgagctattttgcttcctgggcagatctttggcaatgctgaatattcacttggggagagaggaggagttaaaaatacagagacacctacccccagctcctcacaataggaatgtggcttcagacccctgacctctgctcctagtaacctcttgtttgcgtgctctaagcaccaagaaggcacccaaggcccagccagtctcagaaaatttagcaaataataaataacccctactcgagtcattgcatctctggttaatattcttagaaatcttggcttctcagccctcctgttgcccactctgtctggatctctctgtagagcctacaagaccccaccactgcccagctggagaactgtccagtatggcctgttgacaccattcagaccccacaggagcgctgtatgtccgtgctccttttcccttttgggctggtgctgccactcagcaataatcctctctgtgctttcttagacccctgtcctctgtgaggctggctaggatgcaagagtccttgtcttttcatgctgcacaaacaagcatgcaaaaagctttttatccctagcaaaacatgtaccttcctgtttctaatcactggacaagaatttgcagataaagaactcagctcatcctgccccacactgagttctgtcctggacaatcaaaagcaagccgtgactgtagcctggaacagttagcacagcaggctggggaagcccaggctccaagggagtggaagctgcagagcactggcttttctagatgggcagaaactgaggatgcctttctggtgggagagtgggatagaattgtgtcacctgacatttcccaagccttcttcagtcagtcagcccagtgtgtagtgatccaagcccatgattgccagggtacctgttagagaccaaatctctactaggggagtgagaagtaggatggatcgttctccttgtttttgtctgtgttggccttactcatttctaagtgcaataaggcagtgtctcagggactgcacctgtgacatcctgactggatgcttccctgtggtcctcctggaataagggtagacagatttgggcccctcagcatggttagctctgaccttccttgaggttcttttaagaccaggagatgtctggttactgacacctttcaaggtattagtctcctcaccttgtagagtctttaggcatgcacttggggcatcttggtgattagcatatcagctgctagtagcatgggaaagttggagaagaggcattcctaatggaaatggaaaaaacataaatgttctcatataagctctgtattacctatcaaatcctatttgtgcttaaagatcttccttcagtaactaggttaaagttcagatgtgttatcttgagagaagttgatagtctacgcagatagtttacatgatatgagggtcaaaagatatttgtctccttcagcacttcataagatctatacatatcagtcacattggcctcaatcctggcctgctcttacctgccttgcgcccctgctgttgcccacatttgaaagcatccaaatgatccgaactagaatttcctgagaccagcctggatttagggctcctgcccacataaacacaaaggaggaatgtccctgtcttgttccatccccatgggtggtgttgctgctggacaagtgttggcttttaagtatcccctttttttacccacccccaaaattaactagcactcaagagggctggtgatgaaaggctcacctctggtgagaatccctgagagtgcgacatgcttcttcagactggctgcttccattacatttccagggtctgctttactcccagcgggagcagcagtgtctctgcacaaggcctgctgggctccagccttcttgtggagagacactggggagggacaggtcagggtcactgctgtgggcatgtgtgtatccttccacattcttcctttcagtcccccctggacctctgacgtccttgggttggttcttagtgctacttcttttacagactacactttatagaactgattagatttcctgtttatttaatgtgagtttgtgcctttttgtctcaatcttccaatacaggtatattggggggaaaaaagcagtctaataaaatcctagacagagttttttggagtctagcttattggtgatgttcctatgtccatttttcaacttagatgtccttaaagctcctactgatatctccccagtttatttacaggagaggattatgagaagatacagtggtatttctgacattttatgtaaa

SEQ ID NO: 143 - protein, 172 aa, Mus musculus
  Centrin
MASNFKKTTMASSAQRKRMSPKPELTEDQKQEIREAFDLFDADGTGTIDIKELKVAMRALGFEPKKEEIKKMISEIDKEGTGKMNFSDFLTVMTQKMSEKDTKEEILKAFKLFDDDETGKISFKNLKRVAKELGENLTDEELQEMIDEADRDGDGEVNEQEFLRIMKKTSLY

SEQ ID NO: 144 - DNA, 11485 bp, Mus musculus
  Centrin
  misc_feature 189, 594, 676, 1320, 1358, 1578, 2286, 2667, 2710, 2801: n is a or g or c or t
  misc_feature 2914, 2947, 2979, 3146, 8782, 9732, 9975, 10163, 11383: n is a or g or c or t
gctccctgtaaaggaacagagtgtgaagttagactgtggctacctcgagttccttatctgaggatagattgtgctgatctgtgtaagaaatacagactccaagggcaaaatatacttcccagacaagtcaattagtggaattaggaatcctgatatgagtccctgagttttatgttgtcaccacccacntcaggcttagcacactgtataagacctggcctgatgatctaatggaaagagaacaatcccatgaagctggcacctacttatccaatggatacattaccctgagtaaatattgccaaaaaagggcaggggtcttgtaaaaaaacaaagacttctctgtgcagaattcaaagacatggcacaggatgaaagtgtttaggaggtaagccattattttcctggggccatccaactggactctgtcttttcacagacctgagatgccacatctttctcactttttcatatctacttacttttgaatttgctatgggccactcaggagccccttaccaagcccgagcctagcttctactgttcctttcagatttaaggtaaatccaaattgccccttatccttctatttcntcagtacctgttggcaatgctttcttcctgactcaagtgacttctattgaattatcctgttgttgttttagaagttggatcntggaaaacattcacatttcctgcctacatccgagttgctataggggctcactcacttacttattcacaagttgccaaacagcagccactgtcagacagaagccaactagaacagttcagatcttcaaagaaaccatcagcttgtatggaaaacagaaagcttcaaagaatgatagagctgtggttggatcctaaggaggctaagcccatgagaactaatgtatgatgcttagtaacatgaaattatctgaaaacttgagtgctaaggccctagaatgagtgagttaaagagaggatgtgagagtcttaaaagatagatcacatccaagggtgggaagaacatgtcctagtaaccgtgataagttgcaagaacataagaacaaagcaaaattatactcagacaggtcaaagaacttggctagggtcacagaattagcgcataacccaggaagaaatttatttgtcctttctagcctgctgggctgccaccccaaaggggactgatgaaaccagagatgttcactgtaagagtataagcatatgttggcagaggggtgaattatgaaaaactaagggatacttatggactacctgatagactaaggttcactgaacactgaacatgtagtctttccttttccaggnactggtgaacacaaatatgattcctgtcctcctgtgcntaccttctagtggagacaacaaagaaaaaaggttaactttacagtggcttaggaggtgacaagtgctactataaaaatatggagcaatatgaggggcccaggtacaaagtaaagagagtgattacctttacagagaaggtgacaatagctgaagaccaatactaggcttgctggtgcatacctttaatctaagcactcaggaggcagtggcagatggatnccctgtgaagtttgagggcatcctggtttacatagtgagtgccaggtcagccagaattacagagtgagaccctatctcaaaacaaaaaaattatatctacctgtgaaattttctcaaagaattaatcaaaatactaaaaaattttaaaaagttcatgggactgggtaaggtcagtgaaggaatgtatcagccgcaaaaatagtgccctgggtgagagtgagccagagggggaacagtgtgggtgtgatgggagaaggaggaatttcatggcaggctttgcagattatggtgagaactccagctcatactgctgaggaagggctgaggaggaacagagaaaacagaggacaattcaaggacggaactgtgagaactcagaggctggatatgggggattgttgctgcagtgaacaaaggagccaaacaagacacaaaagttttgaagccggttcctggcttaaaggaaagagggcaaagggcctatattacatttatggggagctgttaagtctcaggcctttctcagtttgagagactgatactgtgcccttaaagtccctaaactgattttctttgctttgagggacgtagaacatagaatctgtgttcgaccctgggccttcattactcctggcacagctccaggtagccccaacccgttgtgcactttgccctttaattctctttacattccatacttccaaaacncctgtggctttgctttcaagggagtctcattcaggaatgctccttcccatgtgacttgagtgtctgtacgtctaacaggacacattttgatgagttttgaagatctaaaagtccccagcccattcccctgagagctaaagtgactcttgtagagctaatgtaaagacaaagcctcatgtggattgggtttctaagccccagccctgtgaaccactgacacaatactcagcatgcccactccagtttcgaggtctcagcttctcctggcacagtcacccctccaaaccatttggtcatatcttgctggcccctcagatgttctgtgtcccccaactcggttttaaaatgggtcccacccattccctcctacttcctccaggntctgtcacccacacgcagcagcttttaagggcaagcccgcaantcttacccggtttagacactcaaatgatcgacctcagcttgcagacaaccggcaaccagagaagtctggctgaacacccgccacccttttntactgatagatatgagcccacaatcagcagagcttccttcataatgttgattggtctagcttggctctggcgcaaccaattgacgctcacagcatgattttgcccaatgaggntagtctttggctgccgacgcaccgccctcttgntcttgggcgagttttgccaggttagccccacntcttcgttcccaaaccaatgggaagcgggctgtgcgcgcgtggagcagtgggaacgccgctgaggctgcgagtacgccgttgccttaacaaccggtggcagagtccgttgggtgatggtaagtgctagggattcggtggaccccacgcggcgtccccggtcctttcntaggcctcggtgcagccttgctacctttcttgcacggttcttggcgttgacgcactagttcttccttggagctgtgtgccggaagggtagaagagaaagtacagccgccagcagcttgccttgcctgctctttcccactaccccctcctcgcccaagtcaccttcagccacccccgcacaaactgcctctggacctccgctggctttcaggaaacagcagggtgaccattctattgcttcccttagacttccgcctcagtcaaactcaggcctcctggccgcggccacccagttaaagtttatgcattggtgctaagaggtttactgtgttctgatggtcgcaaacgctttcaggagaggctgtgagaaagcacgcaggtgcaaatggtttgatttttatcactttgtaccggcataatttttatcttagtaagtttacatttagccaaatttaggcataagtaattggaggagcagagttcttgggaactggcaccacaagtagatgttttaagtacatttctaaaaccgagagtacggaaatcatatacagttgatcatccataactgtaattggtttctcaaagagcttttgatgatgcttttttagatttaaaaatgactgaaattgaatctcctaaagtgacacatggattaatggtacaattgcatgaactttctgtagtataaactttaagacagtggaggtcagagttatgtcttctcatgaaggctatgttaacactagaaattcatattcatatattcacttgctctatgttgatctatacaagaacaaggaggaaaatggtaatatactattttaaaacaaaaactctcttctatttggtggctccccaatgaaatatagttgaatttagtcatatgagacatcacattaagacaaatttacagttatattagaaaataacctcattattgccaatttctttttttataacttagtaaaaactgacatatataaattgaaatagttttaagttgagagaaagttttttcttcacagaggtttgtgctatttgtcatttagagttggggttaattttattttagtttttacacttattattccttggtggagaagcacattttagcctgagtgtggcggtcagagaataatttggaagagttagttctctccttttaccatgtaagcatcgtttcccttttcatctttgacaacgacaactgaagcctgggtcctggttcccacttaggttatcaagcttggcagcaagaattctcactggcccatggaagtttacgtaatgacataagtacattacaaacgatggcacacctcattgaaaaagatatgtatgtttagagctgtcataaataaaacaaggactatggcttgtaataatgtgcttctgtgtttatatattgtgtgaaggcctctaattttaagaagacaaccatggcatccagtgcccagagaaaaaggatgagtcctaagcctgaacttactgaagaccagaaacaggaaatccgggaagcttttgatctctttgatgctgatggaactggaactatagacatcaaagaactgaaggtaagctgcacacatccttttctttgttaccttgtgtttccttattgcttgtcttttagctgttaccgttcttctcctttctgcctgcaaaaagtaacagacaagggtaccctgtgtatattttacctgaaacaatggtctaattgataaagttgattgcaaatatcaattaaatcagccttaagtgttccctgatcatttccatcattttatcaggtgtttggttaatatcttcaatagtcatttttgtttttacgttatgtatctatttagatgattctgttttcattgtaggtggcaatgagggccctgggctttgagcccaagaaagaagaaattaagaaaatgataagtgaaattgataaagaaggaacaggaaaaatgaacttcagtgactttttgacagtgatgactcagaaaatggtaagttagttaagataattagcatgctttctacccataatggtagaaacatgagaatctagacatacaaagagctttatccaacaaaatctatcccttccacatgggagaagatagtatttttaattgagaggatctctacgtttcatttggctttctttaaggtattagcattatcttgtttcatgtggccacatgataatcacaagcagtaaaaacttttaacaccgagattttcaatgctagtcatttttggttttaatttattattattaaaaattaaattatcatacaataaatcaggtgtcaatctgacattttcagacaaatggttcacacttaagattggttcctagattattcttccacctgaacctcctggcaagaaccttcctgaaatagctgaggtttgaacgctttcagaaattctgctcttctgcattacaaggactcagggccctggtaattctttgaaggccattgtgaaaaatacctctctcctcctctgcctttatcagtctatctgttttagcaatgtattttccctgactacaaccctactcactgcttctatattttaaaaatgaatctagtgtctgcttgttttgtacagtactttatatacaattatatttcctatgtaacccctgagtttatattcactttactaagtatgttttcttttttttttttttttttacaatgtaccatacttgtttgcctgtgaccaaggacatatatcatgacagctatcaccaggaccttatgataatgtgggccatggccggggaaattaatctaagaagatagttttcctacaactcccttcttgggattagaactgggcagcgttctatacaagacaaagcacaggagggacagtatagatacctggccagatccagtgtcaggtgttagaaagatgagccccagctcactccagaagctcttgtcttctacctgtgaaaacagtatatgactgttcggctataataggaacctgtccttgccacatgatactttgccccacccccccaacaagtcctcatgtctattttttaggacttcttgactttttcaaaagcaggcatcttttttctactaagttctgatttgattatggaatagatgatggcagaggaagtagaaagggaatatatgccaccatgaatcagaggacctggcttcctaacattgttcaagtcaggtttttggagacaaaaagatgaccggggagtagcaagagtggctggatataagtaactatcacttttgtgttctactccagtctgagaaagacactaaagaagaaatcctgaaagctttcaagttgttcgatgatgatgagactgggaaaatatcattcaagaatcttaagcgcgtggccaaggagctgggtgagaacctgacagatgaagaactgcaggtgagaaaaagctatggctttcgtgggttctattttctctattttccttctttgaaaggaaagctagtatccctcatacctgtggtgataatttcatacctgtggaccctgtttcgataatacacatgtacaattgaagttccctcatttgggtttcaggtcagggtgactttccagcttcttttcaatggatgcatatgacagtcattgagatttggcttttaagtaactttcatagaaaggggcatactcacattaaatggaccatagtcatcttttctcatagcattatttgaagtttcttcttttttttcttttgttttgtttttcgtttttttcaagacagggtttctctgtgtagccctggctgtcctggaacacactctgtagaccaggccggccttgaactcagaaatctgcttttgtctgcctcccaagtgctggaactaaaggtgtgcgccaccacagcctgtctgaagtttcttatctaattactttcagtttagtttgtgacttaatctaagatgaacccttatcttctgtgcaggaaatgattgatgaagctgatcgagatggagatggtgaggtcaatgagcaagagttcctgcgcatcatgaaaaagaccagcctctattaagatcagtgtttctttttctactgcaagcacatgtgactagatttagtgcctggcattttgtgaaatatggcttttgaaagcctccctcccccaacctggggtaactttagccatgaccttgaatctatttttgacttttggaagtgttctttgatattaagttctttgtacatttacctgctgactaaatcaacagggcagaacaagagcacatagagtggggaaaagggtctgaaagtgtgactgtggccaccccaccttccattacttcaccttgctcatgcatatccactcgactgaaaacatgcagtggcttcttagttgtccatgtatccatgtcaccataagcagtggttgttcttaaagtggttttggttttcatttgacaccacagtacagttttctcttttacaaaacccaatgagtgcttgctgtggcatttggatgtgtgttaatgtatttgtttggtctttaaaaaaataaaacctttcttaatttaagctctcattctttaaaggatgagtattttttagctttaactgtgagttcaccttgtaaacaactgtgttgaggacagcctggtacatatatacaatttgtcatcggcctatggattaaaaaagggtaataattctttgtaacttttctgccataaatagtttttttgctttcagaacttgtggatttttacagctagtagaatttcttatgctctaagcctatagagtcttatgtgtaatttctgcttggacaaaatggagagggatgggcagtaggtaatattcaggcaatcttatgagattatttgttttataatatctcattgtacaagtgccctctgggcttgcacagaattgcctatgagagaacccaagtatgtggcattgacatctaatccaggatgaagggtgggaacaagaagactgaagggaaatggaaaatgaacaatgattaaatacatacatgaaaatgtacctacatatatacacacacaaaacccactataagagccaggcaggtgatcaagatggcaatcccaatggatgaggcaggagggttgccatgacttttagtcatgctgggcctacataatgagtttcgtatcattctgggtcacaaagtctgatcctgtctcaaagaagcaaaacaaaacaagactccacataaccagatcggtttgaatcatatcatcaatgggttatatgtacatatagttaaaaatttgtagatatatttattttatgggtatgattattttgccagcatgtatatatgcacattatgtgtgagcctggtgcctgcattagttagaagagggtataaaattctatataactagagtaagggacagttgtgagtcaccatgtaggtgctgggtgctggaaatcgaacccaggtcttatgcaagagcaacaaggcaagaattctcttaaccactaagtaaactctccatactctttcccactctctctgtttctgtggctcatttgtctgtctgtctctgtttctttttcttcctctgtctgtctgtctgtctctttctctctctctctctgtatgtgtgtgtgtaatanrtaaaggcctccaattcctcttgatctaacattcaactttccaaggcattttatattttctgttgggggcctgctaaaaagttgtgctcctgggcacgcctttatacgttggcagtcttgaggatctaggtgtactgggataagtgagggattactccgtggaaaacacagggagacaaaaagccaagaggcacctcagatttcagttacaacatgggttcacttagttcctggatggaaatttggggcaagctgcttctcttagtgtctcgaattccttgtacaacgaggagaactgttgaatggagattttgtgcagtcaaatgaaaacttctcaacagaaccttgcgctatgctattcaagtataagatgtttcagaattatctcattccatgaaacttacaatcattgtacccaaagtcattggcagcattttttgacagcatgttttttagaaggataaaagatagttagaaagactgaccttcagcccactttactatgaagtatatagccccacaaaatcaatttattcctaatgggcaagtaaaagttctctatagtttgtgtatgcacaattatattttgaaatatgcctactttataaaatagtggaatcaagctaattaccctgagaacattctcctactgtttaatgtttcccactctgataataaatctctttagaatctcttgatggaggtgattattgcatatcatccctagtgacaaaagcaaatataaggaagtcaccatgtcctgcagtgcagacattctgtgattctcagtataggaaacagatagacaggatgagtcatccaagcagggaggtggggctaaccaaggagctgtgagaagaactggagctgtgtaagttcagttcatgtggagccaggcaaggggcactgtagggattgggcatgtgggatagaaaaagactgaggcagantgatcgatgggatgggcctggttctatttagcatgactgtaccagagacttgggcactcaggagagggacaagttcagccaattatctctctctctctctctctctctctctctctctctctctctctctctctctgtgtgtgtgtgtgtgtgtgtgtgtgtaagagcagtagcaaaggatgggaagaatggacccagacacattttataaagtaggaagggatcagaagttgaaggaaccanggtgagttcagttcattcaggacagaacacagtgatgggtggtggggaaggagagagagagaatgtagaagatagtctatgtgaggctgtagctgagacatttttgttgagtgggattcagttgaagacagtaatgactaattgatgtgatcttaggcatgtagtgggaatggggagggagcacatanaagttttggaaagatggtctggaggaaagaagaagtccattcatgttgggcttaaagacatagtaagtattcatgaaagatttttcaatggttgagtctttttctgaagacacaccagtgttgagtttagaatctatttgagaaagcagtttaaagagtaaggtagttaaattacagtcctcggaagacatagacacaaaacataggcaaaacactgtaggagagctaaacgcagactgacttcgctaggccaccttgaggtacttttaccttctaccaggtcttaccttctttggagactattttgcttcagtctcacatgagcaccttctgctttttttcttcctcatcttgctatggtttctctggtggctaaggtaacaagagaacatgtgcttggaaacatgcctctttggaaagcctagtagttagactgtctgtttagaacaggccacgtggctacaagttcctgagcatgtccattgacatctactaggaataactttcctgaagtttaatggcttctgaaagtgctgaccttgcaaacagtgtcaagtacaagaattttgggctcccctccagttcttctcttgcttgctttaactacactgtaggcaagagctgttcaacttggtttcatttttgtatcctttcaaatactagaattttggtagcagggttaaaggaagtaatgaaatcaaaaccacacttgaatagtagtagtgacttggttactagtccccagaaaacatgcagtattcagcctactatacaaataggcatccatctgtttggccagaattgcttgctgccctgatggtgtttttgaagtcaagatacacacccctacccgacccccactgcctaatccaggaaatgccctttctaagtcctccactgtgattgacattttgcagtaagtcgttacctcctccacaatgagtttcatgacttgttttgttcactgttccatatgctggaatttgcttgagtatcctgcaccttccattgtagttgaagtaatcagtctgcccagattatagtcatgaagccatattaccagtctactgtgccattctgcaacatattatttttctttgtgtgtatatgtatgcatatgtatgcatagccatacatgcaggtctctatgtctgcagaagccaagaaagggcctcagatttcctggagctgaagatataaagccattgtgcaacacctantatgggtgcaggagtttggtcttgggtcctccacaaggagtaatatgcaggttcctcctcaagagccccaaatactttttaccactgaactctctcttagga

SEQ ID NO: 145 - protein, 445 aa, Rattus norvegicus
  Beta-tubulin
MREIVHIQAGQCGNQIGPKFWEVISDEHGIDPTGSYHGDSDLQLERINVYYNEAAGNKYVPRAILVDLEPGTMDSVRSGPFGQIFRPDNFVFGQSGAGNNWAKGHYTEGAELVDSVLDVVRKESESCDCLQGFQLTHSLGGGTGSGMGTLLISKIREEYPDRIMNTFSVMPSPKVSDTVVEPYNATLSVHQLVENTDETYCIDNEALYDICFRTLKLTTPTYGDLNHLVSATMSGVTTCLRFPGQLNADLRKLAVNMVPFPRLHFFMPGFAPLTSRGSQQYRALTVPELTQQMFDSKNMMAACDPRHGRYLTVAAIFRGRMSMKEVDEQMLNVQNKNSSYFVEWIPNNVKTAVCDIPPRGLKMSATFIGNSTAIQELFKRISEQFTAMFRRKAFLHWYTGEGMDEMEFTEAESNMNELVSEYQQYQDATADEQGEFEEEEGEDEA

SEQ ID NO: 146 - DNA, 1592 bp, Rattus norvegicus
  Beta-tubulin
ccaacaccatgcgcgagatcgtgcacatccaggcgggccaatgcggcaaccagatcggccctaagttttgggaggtgataagcgatgagcatggcatcgacccgacgggcagctaccatggcgacagtgacttgcagctggagagaatcaatgtgtactacaatgaagctgctggcaacaaatatgtacctcgggccatcctagtggacctggagccaggcaccatggactcagtgaggtcgggaccattcggccagatcttcaggccagacaactttgtgttcggtcagagtggtgcaggaaataactgggcaaagggccactacacagagggtgccgagctggtggactctgtcctggatgtggtcaggaaggagtcagaaagctgtgactgtctccagggctttcagctgacccactcattggggggaggcactggctcaggcatggggaccctgctcatcagcaagatcagagaagagtacccagaccgcatcatgaacaccttcagcgtcatgccctcacccaaggtgtcggacactgtggtggagccctataatgccaccctttccgtgcaccagctggtagagaacacagacgaaacctactgcatcgacaacgaggctctgtatgacatctgcttccgcaccctgaagctgaccacacccacctatggcgatctcaaccacctggtgtcagccaccatgagtggagtgaccacctgcctgcgcttccctggccagctgaacgcagacctgcgcaagctggctgtgaacatggtgcctttcccacgcctgcacttcttcatgccaggcttcgcacctctgaccagcaggggcagccagcagtaccgagccctgacagtgcccgagctcacccagcagatgttcgactccaagaacatgatggctgcctgcgacccacgccatggccgctacctgaccgtagccgccattttccggggccgcatgtccatgaaggaggtggatgagcagatgctcaacgtgcagaacaagaacagcagctacttcgtggaatggatccccaacaatgtgaagacggccgtgtgtgacatccctcctcgtggcctcaagatgtccgccaccttcattggcaacagcaccgccatccaagagctgttcaagcgcatctcggagcagttcactgccatgttccggcgcaaggccttcctgcactggtacacgggcgagggcatggacgagatggagttcaccgaggcggagagcaacatgaatgagctggtgtctgagtaccagcagtaccaggatgccacggctgatgagcagggcgagttcgaggaggaggagggtgaggatgaggcttgagttcccaggccaagcaggttagggaaagctgaggcgaaaggagggggtgggggtcttaatctgtgaaaataccttggcagttggaagaaggagaatggtcttaggtttgtgctgggtctctggtgctcttactgttgcctctcacttttttctctttttgtaatatcgatgacgtgatgtgatgcttgagatctttctgaactcctgttgtgatggctgaaatcgcctgaacctttgtgtcctaaa

SEQ ID NO: 147 - protein, 237 aa, Mus musculus
  Formin binding protein
KIHCFRSLKRGGVTPEDFSNFPPEQRRKKLQQKVDDLNREIQKETDQRDAITKMKDVYLKNPQMGDPASLDQKLTEVTQNIEKLRLEAQKFEAWLAEVEGRLPARSEQARRQSGLYDGQTHQTVTNCAQDRESPDGSYTEEQSQESEHKVLAPDFDDEFDDEEPLPAIGTCKALYTFEGQNEGTISVVEGETLSVIEEDKGDGWTRIRRNEDEEGYFPTSYVEVYLDKNAKGAKTYI

SEQ ID NO: 148 - DNA, 729 bp, Mus musculus
  Formin binding protein
ccaaaatccactgcttccggagcctaaagcgtgggggtgtcacaccagaagacttcagcaacttcccacctgagcagagaaggaaaaaactacaacagaaagttgacgatctcaatagagagatacagaaggagacggaccagagagatgccatcaccaaaatgaaagatgtgtacctaaagaaccctcagatgggagacccagccagcctggaccagaagctcaccgaagtcacccagaacatagagaaactgcggctggaggctcagaagtttgaggcctggctggctgaggtagaaggcagactcccagctcggagtgagcaggcacgccggcagagtggactgtatgatggccagacacaccagacggtcactaactgtgcccaggaccgggagagcccagatggtagttacacagaggagcaaagccaggagagcgagcacaaggtcctggccccggatttcgacgatgaatttgatgatgaggagccgcttccagccatagggacctgcaaggccctctacacatttgaaggtcagaacgaaggcaccatttccgtagttgaaggagagacgctgagcgtgattgaagaggacaaaggcgatgggtggactcgcatccgcagaaatgaagacgaggagggttacttccccacttcctacgtcgaagtctatttagacaaaaacgccaaaggtgctaagacttatatttaatccacttaaaaaa

SEQ ID NO: 149 - protein, 472 aa, Homo sapiens
  NY-REN-58
MRERFRNLDEEVEKYRAVYNKLRYEHTFLKSEFEHQKEEYARILDEGKIKYESEIARLEEDKEELRNQLLNVDLTKDSKRVEQLAREKVYLCQKLKGLEAEVAELKAEKENSEAQVENAQRIQVRQLAEMQATVRSLGAEKQSANLRAERLEKELQSSSEQNTFLINKLHKAEREINTLSSKVKELKHSNKLEITDIKLETARAKSELERERNKLQSELDGLQSDNEILKAAVEHHKVLLVEKDRELIRKVQAAKEEGYQKLVVLQDEKLELENRLADLEKMKVEHDVWRQSEKDQYEEKLRASQMAEEITRKELQSVRLKLQQQIVTIENAEKEKNENSDLKQQISSLQIQVTSLAQSENDLLNSNQMLKEMVERLKQECRNFRSQAEKAQLEAEKTLEEKQIQWLEEKHKLHDRITDREEKYNQAKEKLQRAAIAQKKRKSLHENKLKRLQEKVEVLEAKKEELETEIRS

SEQ ID NO: 150 - DNA, 2936 bp, Homo sapiens
  NY-REN-58
cgtaacccttagtcccaatgcctccgtaagcggagttgagtgggtgcctgtggttggagctgtggaggtgtccccggtggcgagcgcggccagaactgcggtcacttaagttttccgtgtgcgggttgcaaggagcgtgcgtgcgtctggtatagggaggacacctctggattgaggatcttatgacctactttagaggaaggtataatttggcttcctgagattctgccttagcaagaaaggagtgggaaatacccttggaaagaaaactaaaacagtaagaaagccaaaacttatttttacatggttgtcagcacatttaccgatatggacacttttcccaataattttcctcctggtggagacagtggattgacaggttctcagtcggagttccagaaaatgttaattgatgaaaggttacgatgtgagcatcataaagctaattatcagacactgaaggctgaacacacaaggttgcagaatgaacatgtaaagttacaaaatgaactcaagcacctgtttaatgaaaagcaaactcagcaggaaaaacttcagctcctgcttgaagaactaagaggagaattagtagagaaaactaaagatttagaagaaatgaaactgcagatattaactcccaaaaattggaattgctaagagcccaaatacaacaagaattagaaactccaatgagagaacgttttaggaatctagatgaagaggtagaaaagtatagagctgtatataataagcttcgctatgaacatacatttctcaagtcagaatttgaacaccagaaggaagagtatgcacgtattttagatgaaggaaaaataaaatatgaatcagagattgcaagactggaggaagataaagaagaactacgtaaccagctgcttaatgttgatctcacaaaagacagcaaacgagtggaacaacttgctcgagaaaaagtctatttgtgtcaaaaattaaaaggtttagaggctgaagtagcggaattaaaggctgaaaaggagaattctgaggctcaggtggaaaatgcccaaagaatacaggtgcggcagttggctgagatgcaggctacagtcagatccctgggggctgaaaaacaatcagctaatttacgggcagaacgcttggaaaaagagctacaatcaagcagtgaacaaaatacctttttaattaataaattgcataaagctgaacgagaaataaatacattgtccagtaaagtaaaagaacttaaacattcaaacaaactggaaataacagacatcaaactggagacagcaagagctaagagtgagctagaaagagaaaggaataagcttcaaagtgaactggatggattacagtcagacaatgaaattctcaaagcagctgttgaacatcacaaagtgctcttagtagaaaaggatcgtgaattaatacgtaaagtacaagctgccaaagaagaaggttatcaaaaacttgtggtattacaagatgaaaagttagaactcgagaacagattagcagatttggagaaaatgaaagtggaacatgatgtctggaggcaatctgaaaaggatcagtatgaagagaaattgcgggcttcacagatggcagaagagatcaccaggaaggagcttcagagtgttaggttaaaacttcagcaacaaattgtgactattgaaaatgcagagaaggaaaaaaatgaaaattctgacctaaaacagcaaatcagtagtttgcagatccaagtgacttcacttgcacagtcagagaatgacttgctgaattcaaaccaaatgctgaaggaaatggtggagagattaaaacaagaatgccgaaattttagaagccaagctgaaaaagcgcaactagaagctgaaaagacattggaagagaaacagatacagtggttggaagaaaagcataagcttcatgaccgtatcacagacagagaagaaaagtacaatcaagctaaggagaaactgcagcgagctgcaattgcccagaaaaagagaaaatctcttcatgaaaacaaattgaaaagactacaagagaaagtagaagtcttggaggcaaagaaagaagaattggaaacagaaatcaggtcttaaatagacaaaatgttcctttgaagactatacaaggcttcaaaaaagactaaaagatatacagagaagacataatgaatttcgaagtctaattttggttcctaacatgcctccaacagcatctatcaatcctgttagctttcagtcatcagccatggttccaagcatggaactaccatttcctcctcatatgcaggaggaacaacatcaaagggaactctctctacttcgcaaaagactagaagaactggaaacaacacaaagaaaacaactagaggaacttggatcttccggagaatgatgttcttggagaacaggcagatcaaaagaggtgaagttggtgactcagtaaaacttgacattttaacctgtggcatttagatactttttactgtttgccaaaacacttgaatgtgcctcaagaaaaggtacctactacatgctgtattgtatgactgtcaggattttaagattatacaagtgaagcattaaaagagaaattctcagagatatttagaatatttgacaatggtttgagaatgtaaaacaaaaaggaactagttagagtcaagttttaaaatttttactttgttgaatttttttttttggcattttgagtgaaatataactatcattaattctctcttcatctttgagatgcttggccataacagggtccatacacatcttctggtttactatatacaaaaactgtagttgaaaaaagatgacaatttaaaagtcagcctaaagaatgtaaaggtatctatatacaaaaggctaccttttctaaaatctgtgtgcacataattaaagagcttaatttttaaa

SEQ ID NO: 151 - protein, 583 aa, Mus musculus
  Radixin
MPKPINVRVTTMDAELEFAIQPNTTGKQLFDQVVKTVGLREVWFFGLQYVDSKGYSTWLKLNKKVTQQDVKKENPLQFKFRAKFFPEDVSEELIQEITQRLFFLQVKEAILNDEIYCPPETAVLLASYAVQAKYGDYNKEIHKPGYLANDRLLPQRVLEQHKLTKEQWEERIQNWHEEHRGMLREDSMMEYLKIAQDLEMYGVNYFEIKNKKGTELWLGVDALGLNIYEHDDKLTPKIGFPWSEIRNISFNDKKFVIKPIDKKAPDFVFYAPRLRINKRILALCMGNHELYMRRRKPDTIEVQQMKAQAREVLHQKQLERAQLENEKKKREIAEKEKERIEREKEELMERLRQIEEQTVKAQKELEEQTRKALELEQERQRAKEEAERLDRERRAAEEAKSAIAKQAADQMKNQEQLAAELAEFTAKIALLEEAKKKKEEEATEWQHKAFAAQEDLEKTKEELKTVMSAPPPPPPPPVIPPTENEHDEQDENSAEASAELSSEGVMNHRSEEEWVTETQKNERVKKQLQALSSELAQARDETKKTQNDVLHAENVKAGRDKYKTLRQIRQGNTKQRIDEFEAM

SEQ ID NO: 152 - DNA, 4238 bp, Mus musculus
  Radixin
  misc_feature 2540: n is a or g or c or t
ctcgcaccgccgactctccgctcgttcgccgccagccacgacgcccccgccgagccgcgcctcagccagccggcgcgggcagggaaggagccactcattttcggggctataattgtttatagaagtgaagagtttctaaagaaggtaacaaacaagaaaaagaaaatgccgaagccaatcaatgtaagagtaactacaatggacgctgagctagaatttgccatccagcccaatacaactggcaaacaactttttgaccaggttgtaaaaacagttggcttacgtgaggtctggttttttgggctgcaatatgtagacagcaaaggatattctacatggcttaaattgaataaaaaggtaacacagcaagatgttaaaaaagaaaatcctttacagttcaagtttagagctaaattctttcctgaagatgtttctgaggaattgattcaagaaataacacagagacttttcttcttgcaagttaaagaagccatcttaaatgatgagatatattgcccaccagaaactgcagttcttttggcttcgtatgctgtccaagccaagtatggagattataataaagagattcacaaaccaggctatctggctaatgacagactcttaccacagcgtgttttggaacaacacaaactgaccaaagagcagtgggaggagagaatacagaactggcatgaggaacacagagggatgctaagggaagattcgatgatggaatacttgaagattgcgcaagatctagagatgtatggtgtcaactactttgaaatcaagaataagaagggtactgagctgtggctaggtgttgatgccttaggcctgaatatttatgaacatgatgacaagttaacacctaaaattggttttccctggagtgaaatcagaaatatttcatttaatgacaaaaaattcgttataaagccaattgacaaaaaggcacctgattttgtcttctatgcacctcgtctgagaatcaataaacgaattttggccttatgtatgggaaaccatgaactgtacatgcgaaggagaaagcctgatactattgaagtacagcagatgaaggctcaggcccgggaggttttgcatcagaagcagctagaaagggcacaattagagaatgaaaagaagaaacgagaaatagcagaaaaggaaaaggaaagaatagaacgtgaaaaggaagagctgatggagcgtctgaggcagatcgaagagcagacagtgaaagcccagaaagaactagaagaacagactcggaaagctctagaactggagcaggagcgccagcgagcaaaagaggaggcagagcggctagacagggagcgccgggctgcagaagaagccaagtctgcaatcgccaagcaagctgctgaccagatgaagaaccaggagcagctggcagcagaacttgccgaattcactgccaagattgcacttttagaagaagccaagaagaaaaaggaagaggaagctactgagtggcagcacaaagcttttgcagctcaggaagacttggaaaagaccaaagaagagctaaaaactgtgatgtctgcgccacctccacctccccctcctccagtcatccctcccacggagaacgagcatgacgagcaggacgagaacagtgcggaggccagcgccgagctgtccagcgagggggtgatgaaccaccgaagcgaggaggagtgggtcaccgaaacccagaagaatgaacgcgtgaagaagcagctccaggcattgagttcagaattagcccaagctagagatgaaaccaagaagacacagaacgatgttcttcacgctgagaatgtcaaggccggccgtgataagtacaagacccttcggcagattcgacaaggcaatacgaagcagcgcatcgatgagtttgaagccatgtgagagctgttcttgtgatccatgtccttcataagctgaaccaccaccagagaaaagcaggcctgtgcagtgcagatgcaatggaacgcatcccaccttgccaaagcactcataccagtcgactgtgctcactagcaggacactgaagggtgtccttcatcattaaggcagtgtgatgtcatgtttggtcatttttcttttgtccagggaatggataatgacattctgtcacccacccttttgtacatttttcactttttgtttgtttcatctttttcagttgaatattaatactaatggccacgtctgacaaatgtgtgtatgtgctttgagcactgtgtacatcttaggataatggtggacatttcagtgcatgtttagctaatgaacttagttttctttgccctttccatgttgtaggctacatacatctccatgttcattctcatgttttttgtcagtgtgaccttctcatgcccagacatgatagagctgtaattctggtgtcacacggatcacttactggaggtgtataatatgagatagtgaggtcagacagaccacagacaagacatgggactacatcataagatgattagaatgttggacatcgtagtatgcagccngtggttagttattacaaagatcccttagttactgtattgtttgctttccttaagtgcagtcatctctgatagcttgagtccttaagtgcagccatctctgatagcttagtgatggttttcacgtcctgtagtcctatggtggctttccttgcctgttactttagagtctagccactaggagtcgcttctaagaaaattattgatgaagtggccttgtaagtacatggtctctgaaaaaaattcaagttttcttgttaggatgtggaatagaagataacttggatgataactaattctaagttgttgaagggggaaaaaaacccaaaccttggcctttctgcaagggcagcatatggaaacatcaactctgagaacaaaatactacctcactctttacgtacgtggtgactgttcgcacagtctgtgctgcatgtctgtcacccatacgcagtctcaatcatggccttcactgagtgcttttgagatcccagtgctaatgttttaactgcctttctgttgaactgtggggctctgatttgtgtctagattattgtatattctcactggtatgctgttccctggggggtgttctgtgtccgacgctgagtgaccctttgtgagaaagacgttgcctttgcagtacatgaagcatcccattcttcgttcttgatgggatagggatcgttattgtagcatatttggtttctaaatcactgcttatttttatttgcaatctctaaaacaaaattttatttcaattacgtcttactgaagaagtctttccagctagaaagatgttctgacactgtctgatcgtgaagcacctgaatttacagaagatgcagaagcctcgttttctctgcgtggttgagctactttccatttggtattatgcactcaaacttaacattaatctattaaaattgccattttattaagcaattttcacgcacagtagattcaacttgttttttgtgctgttttttgatttttgctgacttaaaaaggattaatttgggcagacattataaaaaggaaagggttaatatatttttggactctgtaggacaaaagagaactggttaaccttgaagtgactgttgtacagtggctgtgcacgtgcttcagactcatttgcgagggaatgctttctgtatgagagggagacggtaggccttaccactcagacctggacgtataagtgctcacttttccaacacatcacagcgatagtccttattgctaaaggacttggcttccctcggagttttactgatttatttttttctctttgcattgtgtacattatcattgctacatcagttgttacagtgttgaaaggctaccagttatatttgctgttaatagtctatttgtagattaggattaaagtgggtttaatccatttttatagctgtatgaatttttctaaacaggaacagccatttgcaaaatgggttttcatagtgattgcatcaattataacatttatcattagcagttgagagcacatgttcatatagcaatgtaaaaacctactaatgagtatttggtaatttcccattagcataattttatgttgtacaagtaaattacaattccatctctaatcttggataatactggttggttaacaataaagtgacaaaagctcccgccttgcaaaaaaaaaaaaaaaaaaaaaaaaaaaaaaaaaaa

SEQ ID NO: 153 - protein, 173 aa, Rattus norvegicus
  Splicing factor 1 homolog
LITEMVALNPDFKPPADYKPPATRVSDKVMIPQDEYPEINFVGLLIGPRGNTLKNIEKECNAKIMIRGKGSVKEGKVGRKDGQMLPGEDEPLHALVTANTMENVKKAVEQIRNILKQGIETPEDQNDLRKMQLRELARLNGTLREDDNRILRPWQSSETRSITNTTVCTKCGG

SEQ ID NO: 154 - DNA, 519 bp, Rattus norvegicus
  Splicing factor 1 homolog
ctcattacggagatggttgctctcaacccagactttaaaccacctgcagattacaagcctccagcaacacgtgtgagcgataaagtaatgatcccccaagacgagtatccagaaatcaattttgtgggtctcctaattgggcccagagggaacaccctgaagaacattgagaaggaatgcaacgccaagatcatgatacggggaaagggatcagtaaaagaagggaaagttgggcgtaaagatggtcagatgttgccaggagaagatgaacctcttcatgctctagtcactgccaatacaatggagaatgtcaaaaaggcagtggaacagatcagaaacatcctgaagcagggtattgaaaccccagaggaccagaatgacctaaggaaaatgcagcttcgagagttagctcgcttgaatggcactctacgggaagatgataacaggatcttgagaccctggcagagctcagagacacgaagcattaccaacacgactgtgtgtactaagtgtggaggg

SEQ ID NO: 155 - protein, 1196 aa, Rattus norvegicus
  SH3-containing protein
MNTDSGGCARKRAAMSVTLTSVKRVQSSPNLLAAGRESHSPDSAWRSYNGRNPETLNGDATYSSLAAKGFRSVRPNLQDKKSPTQSHITINGNSGGAVSPVSYYQRPFSPSAYSLPASLNSSIIMPHGRSLDSAETYSQHAQSLDGTMGSSIPLYRSSEEEKRVTVIKAPHYPGIGPVDESGIPTAIRTTVDRPKDWYKTMFKQIHMVHKPDEDTDMYNTPYTYNAGLYNSPYSAQSHPAAKTQTYRPLSKSHSDNGTDAFKEAPSPVPPPHVPPRPRDQSSTEKHDWDPPDRKVDTRKFRSEPRSIFEYEPGKSSILQHERPVSVYQSSIDRSLERPSSSASMAGDFRKRRKSEPAVGPPRGLGDHSSSRTSPGRADLPGSSSTFTTSFISSSPSSPSRAQGGDDSKMCPPLCSYSGLNGSPSSELECCGAYRRHLDVPQDSQRAITFKNGWQMARQNAEIWSSTEEAVSPKIKSRSCDDLLNDDCGSFPDPKTKSESMGSLLCDEGSKESDPMTWTSPYIPEVCGNSRSRLKHRSAHNAPGFLKMYKKMHRINRKDLMNSEVICSVKSRILQYEKEQQHRGLLHGWSQSSTEEVPRDVVPTRISEFEKLIQKSKSMPNLGDEMLSPVTLEPPQNGLCPKRRFSIESLLEEETQVRHPSQGQRSCKSNTLVPIHIEVTSDEQPRTHMEFSDSDQDGVVSDHSDNVHVERSSFCSESDFDHFSFTSSESFYGSSHHHHHHHHHHGHFISSCKGRCPASYTRFTTMLKHERAKHENIDRPRRQDMDPGLSKLAFLVSPVPFRRKKVLTPQKQTEQAKCKASVVEALDSALKDICDQIKAEKRRGSLPDNSILHRLISELLPQIPKRNSSLNALKRSPMHQPFHPLPQDGAIHCPLYQNDCGRMPHSASFPDVDTTSSYHAQDYGSVLSLQDHESPRSYSSTLTDLGRSVSRERRGTPEKEVKLPAKAVYDFKAQTSKELSFKKGDTVYILRKIDQNWYEGEHHGRVGIFPISYVEKLTPPEKAQPARPPPPVQPGEIGEAIAKYNFNADTNVELSLRKGDRIILLKRVDQNWYEGKIPGTNRQGIFPVSYVEVVKRNTKGSEDYPDPPLPHSYSSDRIYSLSSNKPQRPVFSHENIQGGGEPFQALYNYTPRNEDELELRESDVVDVMEKCDDGWFVGTSRRTKFFGTFPGNYVKRL

SEQ ID NO: 156 - DNA, 6331 bp, Rattus norvegicus
  SH3-containing protein
  misc_feature 5164, 5218, 5650, 5663, 5916, 5948, 5961, 6030, 6051, 6127: n is a or g or c or t
  misc_feature 6172, 6222, 6286, 6301, 6319: n is a or g or c or t
gaattcggcacgaggaaaaatctttggagagaagagagccacagtgagcacgctagtgcacaattattgcagccacgtgtgcccgcaagctggccctgcgacaagctgttgagtgctgttgcaattagctgattggagaacggggactgcagggtgataatgctgcgtctccgctcgcgggcaccaggaaagggttttgtctcgggaaggcaagtcttccctgcacagttatctcagcagctccctagctgaagagaactgggggctctaaagggagggggtcgcactgtgcgagcacagattctgtgccaggctgttgcttatgaaccgcacgtctgggaaagcaggtgtgtgctcggacgggcactgggctggaacgcaggcggcggctctcgggttcacctgcttcctgttaacagactgttggctcacagagcatctgctcttacacgctgaaactgcggctgagaaagggttcccggcatcccacttgactgacggaggcacttggattggacttaatcttaaacctctggaggtcaagaccttttaaaaagggctaaataaacaatctacatgttaaaggccagcgactcctacttcctctgttggagcaactgtgaagtccagcctcttctaggaaaactgaagactttaataacacaccgttcaaggtgaaaatgaatacagatagcggtgggtgtgctcgcaaacgtgccgccatgtctgtcacgttaacatctgtgaagagagttcaaagttctccaaacctattggctgcagggcgtgagtctcactctccggactcagcttggagatcttacaatggtcgaaatccagagacactgaacggagatgccacatattcctctcttgcagcaaaaggttttagaagcgttcgaccaaacctgcaagacaaaaagtcaccaacccagagccatatcactatcaacggcaactctggtggcgccgtgagtccagtgagttactatcagaggccattctccccttctgcatactccctcccagcctcactcaactccagcattatcatgccacacggcaggtcgcttgattctgcggagacatattcccagcatgcccagtcgctagacggcaccatgggaagctccatcccactctacagatcctccgaggaagagaagagggtcacagtcatcaaagccccgcattacccagggatcggccctgtggatgagtctggaatccccacagccattagaacgacagttgaccggccgaaggactggtacaagacaatgtttaaacaaattcacatggtacacaagccggatgaggacacagacatgtataatactccttacacatacaatgcaggtctgtacaactcgccctacagtgctcagtcacatcctgctgcaaagacccagacctacagacctctttccaaaagccactcggacaatggcaccgatgcttttaaggaggcaccctcaccagtgcctcccccacacgttccaccacgaccaagagatcagtcttcaacagaaaagcatgactgggatcccccagacagaaaggtggacaccaggaaatttcgatcggagccaaggagtatttttgaatacgagcctgggaagtcatccatcctgcagcacgaaagacccgtctccgtctaccagtcttccatagacagaagcttggaaagacccagcagctctgcaagcatggcgggtgactttagaaaacggaggaagagtgaacctgcagtgggcccgcccaggggcttgggggatcacagttcaagcaggaccagccccggccgggcagacctcccaggatcaagttccacctttaccacgtctttcattagttcttctccttcctctccctcgagagcacaaggtggggatgatagcaaaatgtgtccgcccctttgcagttactcggggctcaatggctcgccctctagtgagttagagtgctgcggcgcttatagaaggcacttggacgtcccccaggactctcaaagggccatcactttcaagaacggctggcaaatggcccggcaaaatgcagagatctggagtagcactgaagaggcggtttcccccaaaatcaaatcacgaagctgtgacgatctcctgaatgatgactgcggcagcttcccagaccctaaaaccaagtcagaaagcatgggttctctgttatgtgacgaaggctccaaagagagcgaccccatgacgtggacttccccctacatcccggaagtgtgcgggaacagcagatctaggctcaaacataggtcagcccataacgccccaggcttcctcaaaatgtacaagaaaatgcaccgcatcaaccgcaaggatttgatgaactcggaggtcatttgctctgtgaaatccaggatccttcagtacgagaaggaacagcagcacagggggctgctccatggatggagccagtcgtccaccgaggaggtgcccagggacgtggtacccactcgcatctcggagtttgagaagctgattcagaagtcaaagtctatgcccaatctaggagatgaaatgttatctcctgtaaccctagaacccccacaaaatggtttgtgccccaagaggcgattttctattgagtctctgctggaggaggaaactcaggtccgacacccttctcagggtcagcgaagctgcaagtcgaacaccctggtacccatccacatcgaggtcaccagcgatgagcaacctagaacacatatggagttttccgacagtgaccaagatggggttgtgtctgaccacagcgataacgtccacgtcgaaaggtcgtccttttgtagtgaaagtgacttcgaccacttttcattcacatcctctgaaagtttctacggatccagccatcaccaccaccatcaccaccaccatcacggacacttcatcagttcctgcaaaggccgatgccccgcttcttacactcgatttaccacgatgttaaaacacgaaagagctaagcatgaaaatattgaccgacccagaaggcaagacatggatcctggcctatctaaactcgcgtttctagtcagccctgtgcctttccgaaggaaaaaagttttgactccccaaaaacaaactgagcaggcaaaatgcaaagcctcggtagttgaggctctggactctgcccttaaagacatttgcgaccaaataaaagctgaaaagcggagaggaagcttgccggacaacagcatcctgcacaggcttattagtgaactgctgccacagattcctaagaggaattcatctcttaatgctctaaaaaggagccccatgcaccagcctttccacccactgcctcaagatggtgctattcattgtcccctgtaccaaaatgattgtgggagaatgcctcacagtgcctctttcccagacgtggacacgaccagcagctaccacgcacaggactatggtagtgtgctgagtctccaagatcacgagtcccctagaagttactcgtctactctgactgacttgggaagaagtgtatcacgggaacgaagaggaactccagaaaaagaggtaaaattgcctgcaaaagctgtctatgatttcaaagctcagacttctaaggagctgtcatttaagaaaggagacaccgtctacatcctcaggaaaattgaccagaactggtatgagggggagcaccacggaagagtgggcattttcccaatctcatacgtagagaaactaacacccccagaaaaagcgcagcccgcgagaccaccacccccagtccagccgggagagattggagaagccatagccaagtacaacttcaatgcagacacaaatgtggaactctccctgagaaagggtgacaggattattcttctcaaaagagttgatcaaaactggtatgaaggtaaaatcccaggaaccaacagacaaggcatcttccctgtctcctacgtagaagttgtcaagaggaacacgaaaggttctgaggattaccccgaccctcctctaccccacagctactccagtgatagaatttacagcctaagctccaataagccacagcgtcctgtgttctctcacgaaaacattcaaggtggaggagaaccgtttcaggctctgtataactatactcctaggaatgaagatgagctggaactcagagaaagtgatgtcgtagatgtcatggaaaagtgtgatgacggatggttcgtgggaacttcaagaagaaccaaattctttggtacttttcctggaaactatgtcaaaaggctgtgactcacctcactcctaatttatgccacatttcagccacacatctgcattaacccacctgaaacgtcccaggaggcctgttgctgcctcgccttatggtttcccaatagcccattaccatctccatctgctgccaccaaatcaccagcagagggactgccgctgtgagccttagggaggctgggagccttagagaaaagtggcaaaacttacacccacataaatattcagtctcctgctttctgccctgaactttgaaatgcctgtatatggaatcagaatgaaaatgatcatactttcaaaaaagtgaaataattaaggaagaaagaaagagaaaagaaatagagagactcttcaggaggctgtctggcctcatggctgaatctccacctctctggaaggtgtactgtcctcaggaagcctgaagattgttttttttctgaaatgctatggttccagttctcactctcatctaggcggtatattttcctttcacgagtttgcctagcgctcgggtttacactacatgacaactatacttcggctgttgtttgcttgcacttattattccttgtttcatgcacagtgatcacaaaatccagagtgcctagggaaggttcactggttccactggttcgagtgtgatttttgttgactgcattatattttcacacggggaggggggtctttcccctgcccacttttttgtgcttattagaagtgcaaacagtgagcaactgagagctcagccacaccacaggacaaatccgtgttgtgaattcgcattgctgttttgtgtattaaggtgtaatcatcagcttcatggacaacaagctattagtgatttctttacctgttaaaacttacaggcagtgctagtgagttaggcagaaagntgacagtaataccagtaggtgagcttcactgcgtgcatgctcacacgtttgagnttgtatgaggacatataattcatatgctatgttgtacattttatggaaatataagagaatcccacattattttatagagtacttcaggagcatcctaagtgttaaggctggctttagcaaggattatgatcaatacaactatttttactacaataattatttttcttctatgagacccagaatcctgactccacttgcagacaggaatatatatgttgagcctgacttttttttctggtatatgtaaaatacttcccaggaatacattgggcacttttgggaataatggttaaatcattcaggttgtgcttcctgcccccaaaacagatctacaaaatgataccaaacctgaaagatttaacggatttacggtgcctgcattccacacaacctcacacttagctttgtatttcaaatgaatttgcataaaanctgttcactttancaccttatagtcaaaactttttatggctttcctcccatgggcaatgcttgatcttcccaacatataaactctggcatattttgttcatatgtttgttcctttttggttgtacagactatttacttgttcagaaaacatcgagatctcccaatttgttctttaccccgcccttaaaaggaatttaaactctttcagaagatcgcccttcaccacatctccacagatcacaagctaaggtgaatctggaatatancgtctgcacaaaattttgtgactcagaaaganctttgtaactacnctgaaatacatataataacaatgttccagttacagaggaatattgttggggcaggaagtgaagaaacancttcaagaaacccactttacnctccagttcacaactagctttatattagaaaaacttgggattggaaagtcagccagccagccggccacctgcagcnttgttgataaatgaatactttttcacaccatttatgaaaacaaancttcaactctgttgcctgttatatttaagaaaaattgctgtttctactcnctgtatctgattttaaaaggaaaaaaatattcacgcctggctttcaggacattgactttgaatncttacgagcaaaggncgttgtgtttttcttgcncgtgccgaattc

SEQ ID NO: 157 - protein, 766 aa, Homo sapiens
  Sperm-specific protein
MIHNYMEHLERTKLHQLSGSDQLESTAHSRIRKERPISLGIFPLPAGDGLLTPDAQKGGETPGSEQWKFQELSQPRSHTSLKDELSDVSQGGSKATTPASTANSDVATIPTDTPLKEENEGFVKVTDAPNKSEISKHIEVQVAQETRNVSTGSAENEEKSEVQAIIESTPELDMDKDLSGYKGSSTPTKGIENKAFDRNTESLFEELSSAGSGLIGDVDEGADLLGMGREVENLILENTQLLETKNALNIVKNDLIAKVDELTCEKDVLQGELEAVKQAKLKLEEKNRELEEELRKARAEAEDARQKAKDDDDSDIPTAQRKRFTRVEMARVLMERNQYKERLMELQEAVRWTEMIRASRENPAMQEKKRSSIWQFFSRLFSSSSNTTKKPEPPVNLKYNAPTSHVTPSVKKRSSTLSQLPGDKSKAFDFLSEETEASLASRREQKREQYRQVKAHVQKEDGRVQAFGWSLPQKYKQVTNGQGENKMKNLPVPVYLRPLDKKDTSMKLWCAVGVNLSGGKTRDGGSVVGASVFYKDVAGLDTEGSKQRSASQSSLDKLDQELKEQQKELKNQEELSSLVWICTSTHSATKVLIIDAVQPGNILDSFTVCNSHVLCIASVPGARETDYPAGEDLSESGQVDKASLCGSMTSNSSAETDSLLGGITVVGCSAEGVTGAATSPSTNGASPVMDKPPEMEAENSEVDENVPTAEEATEATEGNAGSAEDTVDISQTGVYTEHVFTDPLGVQIPEDLSPVYQSRYNNGSST

SEQ ID NO: 158 - DNA, 2523 bp, Homo sapiens
  Sperm-specific protein
gacaacttgagctgaaagcgaaaaactatgctgaccagattagcagacttgaagaaagagaagcagaactgaagaaggaatataatgcattacatcaaagacacactgagatgatccataattatatggaacatttagaaagaacaaaacttcatcagctctcagggagtgatcaactagaatccacagctcatagtagaattagaaaagaacgccctatatcattaggaattttcccattacctgctggagatggattgcttacacctgatgctcagaaaggaggagagacccctggatctgagcaatggaaatttcaggaattaagtcaaccacgttctcataccagcctgaaggatgagctttctgatgttagccaaggcggatctaaagctaccactccagcatcaacagctaattcagatgtggcaacaattcctactgatactcccttaaaggaagaaaacgaaggatttgtgaaggttacagatgcgccaaataaatcagagataagcaaacacattgaagtacaggtagcccaggaaactagaaatgtatctactggctctgctgaaaatgaagaaaagtcagaagttcaagcaatcatcgaatctactcctgagctggatatggacaaagatctcagtggatataaaggttcaagcactcccaccaaaggcatagagaacaaagcttttgatcgcaatacagaatctctctttgaagaactgtcttcagctggctcaggcctaataggagatgtggatgaaggagcagatttactaggaatgggtcgggaagttgagaatcttatattagaaaatacacaactgttggaaaccaaaaatgctttgaacatagtgaagaatgatttgatagcaaaagtggatgaactgacctgtgagaaagatgtgctgcaaggggaattggaggctgtgaagcaagccaaactgaaactagaggaaaagaacagagaattggaggaagagcttaggaaagctcgggcagaagctgaagatgcaaggcaaaaagcaaaagatgacgatgatagtgatattcccacagcccagaggaaacggtttactagagtagaaatggcccgtgttctcatggagcgaaaccagtataaagagagattgatggagcttcaggaagctgttcgatggacagagatgattcgggcatcacgagaaaatccagccatgcaggaaaaaaaaaggtcaagcatttggcagtttttcagccgacttttcagctcctcaagtaacacgactaagaagcctgaaccacctgttaatctgaagtacaatgcacccacgtctcatgttactccgtccgtcaagaaaagaagcagcaccttatctcagctccctggggataagtccaaagcctttgatttccttagtgaagaaactgaagctagtttagcctcacgcagagaacaaaagagagagcagtatcgtcaggtaaaagcacatgttcagaaggaagacggtagagtgcaggcttttggctggagtctgcctcagaagtacaaacaggtaaccaatggtcaaggtgaaaataagatgaaaaatttacctgtgcctgtctatctcagacctctggataaaaaagatacatcaatgaagctgtggtgtgctgttggagtcaatttatctggtgggaagaccagagatggtggttctgttgttggagcaagtgtattttacaaggatgttgctggtttggatacagaaggcagtaaacagcgaagtgcctctcagagtagtttagataagttagatcaggaacttaaggaacagcagaaggagttaaaaaatcaagaagaattatccagtctagtttggatctgtaccagcactcattcggctacaaaagttcttattattgatgctgttcaacctggcaacatcctagacagtttcactgtttgcaactctcatgttctgtgcattgcaagtgtgccaggtgcacgagaaacagactaccctgcaggagaagatctttcagaatctggtcaggtagacaaagcatctttatgtggaagtatgacaagcaacagctcagcagagacagacagcctgttaggaggcatcacagtggttggttgttctgcagaaggtgtgacgggagctgccacttcccctagtacaaatggtgcttctccagtgatggataaaccaccagaaatggaagcagaaaatagtgaggttgatgaaaatgttccaacagcagaagaagcaactgaagctacagaagggaatgcggggtcagctgaagacacagtggacatctcccaaactggcgtctacacagagcatgtctttacagatcctttgggagttcagatcccagaagacctctccccagtgtatcagtcgaggtataataatgggtcatcaacttaggcaactgggtgaagtgcacaaataaaaggaaccaaaataatctcaaacagtcaaaagatttccactaattagtgtcactgtggtggattaaaagatacctattcttgtgata

SEQ ID NO: 159 - protein, 123 aa, Rattus norvegicus
  Guanine-nucleotide-releasing protein
MEPCELQNELVSAEGRNRKAVLCQRCGSRVLQPGTALFSRRQLFLPSMRKKPDLVDGSNPDGDVLEEHWLVNDMFIFENVGFTKDVGNVKFLVCADCEIGPIGWHCLDDKNSFYVALERVSHE

SEQ ID NO: 160 - DNA, 2490 bp, Rattus norvegicus
  Guanine-nucleotide-releasing protein
ggtagccactttggacttatcttcaagaatgtgacatttgtggtaatattctttgcttccccatggcctcaccgtgccacaacagtgttacgtgtttgacactcactgcttgtgcacccatcacttctgatgtatggcagttttgggtcaataagatattagtattactttgactttgacttgtgagtctaggttaaaatcattcggaggattttttattctccgaggtcaccccaaccgaaattttttagttcatatttattttgttttagcccattaggttgtttttatataattgaactagtaaattaaagctccatagggcttctccgtcttattgggagattccagcctcttcactggaaggtcaatttcactgattgaaagtaagagacagttgaaccctcgtttagccattcattctagtccctaattaaggaacaagtgattatgctacctttgcacggtcaggataccgcggccgtttaactttagtcactgggcaggcaatgctctaatacttgttatgctagaggtatgtttttggtaaacaggcggggttcatgtttgccgagttccttttactttttaatctttccttaaagcacgcctgtgttgggctaacgagttagggataggtaattctattgttgggttagtacctatgattcgataattgacaatggttatccgggttgtcatacacttgtgctaggagaggcaatggaaccctgcgagctgcagaacgagctagtgtcagccgaaggccggaaccggaaggcggtgctgtgccagcgttgtggctctcgggtgctgcagccagggactgctcttttctctcgccggcagcttttcctcccctccatgaggaagaagccggatctggtggacggcagcaatcctgatggtgatgtcctcgaggaacactggctggttaatgacatgttcatctttgagaacgtgggctttaccaaggacgtgggcaacgtcaagtttctagtctgtgcagactgtgagattggacccattggctggcattgcctagatgacaagaacagcttctatgtggccttggagcgagtttcccacgagtaactgaggggtttgggacttggctccaccctagctataaagctctgcccacaagaaccgacactgatgtgtcagcagtgctggcagacttcttggtactaatataagcaccggtgtttgcccttgaacttgcagagggccggtcctgtttcctcaggcctcagagcatgtctcctacttagtcctctctgtcacatgtgtcctagagccctttcccctgacttggaacatggaagaacacgcgagtgctctaccagtgtagtctggttccggcactctgcctccgcacctcgatgccaagctctcttcttctcagcaagaacaacattcatctttagccatcacgacgggaactaagatgctaatatttgaaactccacctttcctcattctagaagccaagtgtgatagggtgcacatctgtaatcctaggtcttgagtgggtagaggcaggaagatcaggagttcaagggcagccttagctacatagactgggccaagtgagatgttgtctcaaaaaacataaagcatacaagtatttgagagtaatctcattgtatgtgacctacttatctacagtaatttattctttttaaaagtaaaacatttacagatgtcagtatttaaacctcactttagatacatttttagtactgtgtttgagagccttttttccgggtcaatagtggcattttataatgaggacgaacacgactcctcttccctcagatcttgatcaggtttctctttttagtcattccttgcccctgatgtcaaccctaaggaaaactcagccctagctgtgtgccagactctcttgtaaacctgttccacggacatttctattgttatggacaaggtgttaccttttcttattattagccaacttaaatcttcaatatgatttccagttactctgtcatttctcttctggagtgactcagtagcttaaaaggactctgtgtaaacaggttcaaatactgtgtcatcatcccctcctctgagggcctaaattgagataagtagagacttcattattcctcatgccagagcttaggaagtgggggcagatcaagagttcaaggtcagcctcagttactataatatcaaattcaaggccagcctgtactatggagatcttgtttcaaatgaacaaaacacaaaataaacaagtaggacctgcaaaagtgacacgtagttaaaaatgtttgctgctctttcaggcgacctgagttcaggaccttgcaccctcatgggaggtttattccagttcaaggagatctgcgccttctggtccctgcagatgccttcatgtgtgtggcacccatacaaacaagtgagcacactcgcgtacacacacacacacgcacgcacgcacgtgaataaaaattttacaaa

SEQ ID NO: 161 - protein, 112 aa, Rattus norvegicus
  Intracellular calcium binding protein
MAAKTGSQLERSISTIINVFHQYSRKYGHPDTLNKAEFKEMVNKDLPNFLKREKRNENLLRDIMEDLDTNQDNQLSFEECMMLMGKLIFACHEKLHENNPRGHDHRHGKGCG

SEQ ID NO: 162 - DNA, 494 bp, Rattus norvegicus
  Intracellular calcium binding protein
cggcacgagctccttagctttgagcaagaagatggctgccaaaacaggatctcagctggagcgcagcataagcaccatcatcaatgttttccatcagtactctaggaagtatggacatcctgacaccctgaacaaggcggaattcaaagaaatggtgaataaggacttgccaaattttctgaagagggagaaaagaaatgaaaatctcctaagagacatcatggaggacctggacacaaaccaggacaatcaactgtcctttgaggagtgtatgatgctgatgggaaagttgatctttgcctgtcatgagaagctgcatgagaacaacccacgtgggcatgaccacaggcacggcaaaggctgtgggaagtaattaagaggtcgccatgtaacatctgcccaaccaagtctaaagggaatagcttactaaatgaccttggttctggggctgggaaataatttaaaaatgaataaataaagtctttatccattcc

SEQ ID NO: 163 - protein, 532 aa, Rattus norvegicus
  PTB-like protein
MDGIVTEVAVGVKRGSDELLSGSVLSSPNSNMSGMVVTANGNDSKKFKGEDKMDGAPSRVLHIRKLPGEVTETEVIALGLPFGKVTNILMLKGKNQAFLELATEEAAITMVNYYSAVTPHLRNQPIYIQYSNHKELKTDNTLNQRAQVVLQAVTAVQTANTPLSGTTVSESAVTPAQSPVLRIIIDNMYYPVTLDVLHQIFSKFGAVLKIITFTKNNQFQALLQYGDPVNAQQAKLALDGQNIYNACCTLRIDFSKLVNLNVKYNNDKSRDYTRPDLPSGDGQPALDPAIAAAFAKETSLLAVPGALSPLAIPNAAAAAAAAAAGRVGMPGVSAGGNTVLLVSNLNEEMVTPQSLFTLFGVYGDVQRVKILYNKKDSALIQMADGNQSQLAMNHLNGQKMYGKIIRVTLSKHQTVQLPREGLDDQGLTKDFGNSPLHRFKKPGSKNFQNIFPPSATLHLSNIPPSVAEEDLRTLFANTGGTVKAFKFFQRDHKMALLQMATVEEAIQALIDLHNYNLGENHHLRVSFSKSTI

SEQ ID NO: 164 - DNA, 3249 bp, Rattus rattus
  PTB-like protein
ctcgctggctgcgtggctcggttcttgggagcgaagctttgtccggttcggcaatggacggaattgtcactgaggttgctgttggtgtgaagagaggatctgacgagctactctcaggcagtgttctcagtagtcccaactctaatatgagtggcatggtagttacagccaatggtaacgacagtaagaaatttaaaggagaagataagatggacggggcgccctctcgtgtgcttcacattcgaaagttacctggtgaagtgactgagaccgaagtaattgcgttaggcttaccttttggtaaggtgactaacatccttatgctgaaaggaaagaaccaggcatttttggaactggcaacagaggaagcagctattactatggttaattactattctgctgtgacacctcatcttcgtaaccaaccaatttacattcagtactccaatcacaaagaactaaagacagataacacattaaaccaacgtgctcaagtagttcttcaagctgtgacagctgtccagacagcaaatacacctctcagtggcaccacagtcagtgagagtgcggtgactccagctcagagtccagtgcttagaataattattgacaatatgtactaccctgtaacacttgatgtccttcaccaaatattttctaagtttggtgctgtattgaagataatcacatttacaaaaaacaaccagtttcaggctttgctccagtatggtgatccagtaaacgctcaacaggcaaagctagccctagatggtcaaaatatttataatgcttgctgtaccctaaggattgatttttccaaacttgtgaatttgaatgtaaaatacaacaatgataaaagtagggattatacacgacctgatcttccatctggagacggccagcctgcattagacccagctattgctgcagcatttgccaaggagacgtcccttttagctgtcccaggagctctcagtcctttggctattcctaatgctgctgcggcagctgctgccgctgccgctggccgagtgggcatgcctggagtctcagctggtggcaacacagtcctgttggttagcaatttaaatgaagagatggttacgccccaaagtctgtttaccctcttcggtgtttatggcgatgtgcagcgcgtgaagattttgtacaataagaaagacagtgctctgatacaaatggccgatgggaaccagtcacagcttgccatgaatcatcttaatgggcagaagatgtatggaaaaattattcgtgttactctctctaaacatcagactgtgcaactacctcgagagggacttgatgatcaagggctaacaaaagattttgggaattcacccctgcaccgttttaaaaaaccgggatccaaaaactttcagaacattttccctccttctgcaacccttcacctgtccaacatccctccttctgtagcagaagaggatctgcgaactctgtttgccaacaccgggggcactgtgaaagcatttaagttttttcaaagagatcacaaaatggctcttcttcagatggcaacagtggaggaagctattcaggctttgattgatcttcataattataaccttggtgaaaaccatcatctgagagtgtctttctccaaatcaacaatttaaggacgggagatgaagatggcgggcagatcccattgtttggtgtcatcacctattgactgttcagaaaagtggggaccagagttgattttttcatgctgttctcattccttggttataaatgaaatggcgtatgtaaggcagagtgctaactgctgtatttcatctgttcagtagggaagccattttgtctgttaaattttagtttaattttgcttcttttttttttttttcaacttagtgacatacgtgccttacaaaggaaagctagtgttgctattgtgcatttactaggaaaaaggaattggttgtttagggcacattgttatgtggaaattaaaatctgtttaggcaggggtgtgtcaaaaggttaagtttttgtttctcctgcttggaacttattttgaattattggcttatcacatttctttctatttaatctaataagatacttgatactgaaagtgtaaaacagcatttttagttcctactatcttaggctttattgctttgaaaacattggccttttgtatctcacaaatctggtctagattcagttatgaatataggcattagttaaaattaacaagatgcagagtattaatttcttaagacaagtgatttctgtaagtttgagccctatgtggaaagcattgtggaaccttaacctttttgtacacactcttgtgggacgtatcatataaatgtcagcactaagtaatgtcttgtttgtggctgaatatttttcgtagatgtttttgaagttgacatgacttatgtgcatttaaatatatattgccatccttagtttgtaattaagatttggaaaatggttgtggatttctgagcatgtgcagactggtctagctagttcaggaactggtgcatgtattttcaaagacaaagaaaagtgtactgcgaaaacttgcaggaagattaattttgtggcagttttctaaaactgacaaccaggtgggaccaaagtttatgtgcctttagtcttaatttaccttgcattgtaatattcagttttataaatcttcaaaatattttgtatttaggaatagatctgactttaataaaaacatggctcagaatctacaggtcaaatttatttgaacagttcttgtcaatctgaattgttgattctgttaaatgacaatactttttgaaattgatgtacttagtttcaagattcatagattctgttatctatgtagacagaatggtcatgtatattttctattagttgagtttttacatctttagaaatgtaaaattcagtatagtttgaaagcggcacaattaaaaattaattttctaacaaagttgggaggtcttgaatggttgtttaatttcattttgtgtgtactctgcttacctctgtagcatgctcaataaacacttctgtagctctgtattcaccttttctgtctttctctgctgccttttctctctctcctttgttttcactccactgtgcttctgaattcatgtttactctctgccagggtgggaaaggagtaataatactacaatcctatggctttataccatgaataaatccagatgctgtgaaaatgcaaaaaaaaaaaaaaaa

SEQ ID NO: 165 - protein, 389 aa, Spermophilus tridecemlineatus
  ATPase domain protein 44
MADPRDKALQDYRKKLLEHKEIDGRLKELREQLKELTKQYEKSENDLKALQSVGQIVGEVLKQLTEEKFIVKATNGPRYVVGCRRQLDKSKLKPGTRVALDMTTLTIMRYLPREVDPLVYNMSHEDPGNVSYSEIGGLSEQIRELREVIELPLTNPELFQRVGIIPPKGCLLYGPPGTGKTLLARAVASQLDCNFLKVVSSSIVDKYIGESARLIREMFNYARDHQPCIIFMDEIDAIGGRRFSEGTSADREIQRTLMELLNQMDGFDTLHRVKMIMATNRPDTLDPALLRPGRLDRKIHIDLPNEQARLDILKIHAGPITKHGEIDYEAIVKLSDGFNGADLRNVCTEAGMFAIRADHDFVVQEDFMKAVRKVADSKKLESKLDYKPV

SEQ ID NO: 166 - DNA, 1566 bp, Spermophilus tridecemlineatus
  ATPase domain protein 44
cttctcatcatggcggaccctagagataaggcgcttcaggattaccgcaagaagctgctggagcacaaggagatcgacggccgtcttaaggagttaagggaacaattaaaagaacttaccaagcagtatgaaaagtctgaaaatgatctgaaggcccttcaaagtgttgggcagattgtgggtgaagtgcttaagcaattaactgaagaaaaattcattgttaaagctacaaatggaccaagatatgttgtgggttgtcgtcgacagcttgacaaaagtaagctgaagccaggaacaagagttgctttggatatgactacactaactatcatgagatatttgccaagagaggtggatccacttgtttacaacatgtctcatgaggaccctgggaatgtttcttattctgagattggaggtctgtcagaacagattcgggaattaagagaggtaatagagttacctcttacaaatccagaattattccagcgtgtaggaataatacctccaaaaggctgtttgttatatggaccaccaggcacaggaaaaacactcttggcacgagctgttgctagccaactggactgcaatttcttaaaggttgtatctagttctattgtagacaagtacattggtgaaagtgctcgtttgattagagaaatgtttaattatgccagggaccatcagccatgcatcatttttatggatgaaatagatgctattggtggtcgtcggttttctgaaggtacttcagctgatagagagattcagagaaccttaatggagttactgaatcaaatggatggatttgatactctgcatagagttaaaatgatcatggctacaaacagaccagatacactggaccctgctttgttacgtccaggaagattggatagaaaaatacatattgatttaccaaatgaacaagcaagattagatatattgaaaatccatgcaggacccattacaaagcatggtgaaatagattatgaagcaattgtgaagctatcagacggctttaatggagcagacctgagaaatgtttgcactgaagcaggtatgtttgcaattcgtgctgatcatgattttgtagttcaagaagatttcatgaaagcagtcagaaaagtggctgattctaagaagctagagtctaaattggactacaaacctgtgtaattttatcgtaaggttttggatggctgcatgacagacattgacttaatgtaaaaataaagttaaggaaaataatgtacgtattggcaatgatctcattaaatgtgaatgaataaaatatgtatgagtaacataaaaattagtatgtaattcagtaattcaccttttaaaattgacacagaagaaatttgtatgtttgttaatgttgcatttattgcagcaaaagttacaaaaagaagagtgttgaagcttttcgtatttgccatgtgagcattttgtaaaacactgaaaaatagtttgagatagtagtacaagagagcatttcttaagacttattttatatcatttgttttcttcattctaacaagtttaataaaatctgtttgattt

SEQ ID NO: 167 - protein, 108 aa, Homo sapiens
  BM-020
MAFQNSEYGDDSIKKAQNVINCFPKQWFMNLKGERTISQLENFCRYLVHLADTIYRNSIGCSDVEKRNARENIKQIVKLLASVRALDHAMSVASDHNVKEFKSLIEGK

SEQ ID NO: 168 - DNA, 1556 bp, Homo sapiens
  BM-020
aataaaattctgggccttacttgttttttcaacgacagttttggtcttcagttaagctgttaggcaattttcttcagtggtatggcattttctcaaataaaactctgcaagagttatcaatagatggtttattaaatcgatatattctcatggcttttcagaattcagaatatggagatgacagcatcaaaaaagcccaaaatgtaatcaattgtttccccaaacaatggttcatgaatctgaaaggagaaaggactatttctcagttagaaaacttttgccgataccttgtacacttagcggatacaatttatagaaatagtatcgggtgttctgatgtggaaaaaagaaatgcaagggaaaacataaaacagatagtaaaactccttgcaagtgttcgagctttggatcatgctatgtctgttgcaagtgaccacaatgtgaaagaatttaagtctttgatcgaaggaaaatagatctatgagactgaaaaacctatttgcttgattaccattcccaatgtgtaaattttgtatatatgtaaagtttcttaaactgtaaaatagcaattcttgttttaatacaaaaaacattatattcaaactgtgtccttaaatgatatttcttcagaatgaaaggaattcagattatttctaggagtctatgaatgttttctttactgcctgtcatactttgtttactgaagtattttgtatggtcatttaaattaaccctctcagttaattgtcccctgtaaacgatgtgtgcagtgtaaattgtgtaattatgcatatatatatttataccaccatggacttactttcacactgggaaatttgtggtgtttttccacagaggaagccttttaacagcagaaaattatccggtagcaaattgtcttagggaaattactacactgttgtaacaaaagggctggcaagtgactaaatgttcattaccttttggttagcgttgctatcactgtagctgtgctgccttaacattgagagttgagttgtggacttagtcattgagtgaatgttgaactttcttccttgaatcagcgttagagtcaaatgtgggtttaatgtgaatgctaaatgaatatgcaacatagtttcaaatggaacatagaaatttcacttttgaaaataataaacccacaacctaaaaaaaaaaaattgcatggttttgggctgaccgtcctgtctcattcatgattttactccctgcccagcttgcagatacatgcatttgaattttagtagtctgtcatatttaaaatcccacatatgtgagttaaatatgcaataaagaatacgccttgctgattagccacacccaggcaatttaatatccatggtcttctataatgtttataccacattgtaaatattcagagaacttgttttaaagtttatgctttctgattctgtgattttcaaaagaggaatttttttggaaattaaggactatcgtttgataattatatatgtaattaagatttagccaagcattaaattaatttttaaatataaaaaaaaaaaaaaaaaaaa

SEQ ID NO: 169 - protein, 2649 aa, Homo sapiens
  Pemphigoid antigen
MHSSSYSYRSSDSVFSNTTSTRTSLDSNENLLLVHCGPTLINSCISFGSESFDGHRLEMLQQIANRVQRDSVICEDKLILAGNALQSDSKRLESGVQFQNEAEIAGYILECENLLRQHVIDVQILIDGKYYQADQLVQRVAKLRDEIMALRNECSSVYSKGRILTTEQTKLMISGITQSLNSGFAQTLHPSLTSGLTQSLTPSLTSSSMTSGLSSGMTSRLTPSVTPAYTPGFPSGLVPNFSSGVEPNSLQTLKLMQIRKPLLKSSLLDQNLTEEEINMKFVQDLLNWVDEMQVQLDRTEWGSDLPSVESHLENHKNVHRAIEEFESSLKEAKISEIQMTAPLKLTYAEKLHRLESQYAKLLNTSRNQERHLDTLHNFVSRATNELIWLNEKEEEEVAYDWSERNTNIARKKDYHAELMRELDQKEENIKSVQEIAEQLLLENHPARLTIEAYRAAMQTQWSWILQLCQCVEQHIKENTAYFEFFNDAKEATDYLRNLKDAIQRKYSCDRSSSIHKLEDLVQESMEEKEELLQYKSTIANLMGKAKTIIQLKPRNSDCPLKTSIPIKAICDYRQIEITIYKDDECVLANNSHRAKWKVISPTGNEAMVPSVCFTVPPPNKEAVDLANRIEQQYQNVLTLWHESHINMKSVVSWHYLINEIDRIRASNVASIKTMLPGEHQQVLSNLQSRFEDFLEDSQESQVFSGSDITQLEKEVNVCKQYYQELLKSAEREEQEESVYNLYISEVRNIRLRLENCEDRLIRQIRTPLERDDLHESVFRITEQEKLKKELERLKDDLGTITNKCEEFFSQAAASSSVPTLRSELNVVLQNMNQVYSMSSTYIDKLKTVNLVLKNTQAAEALVKLYETKLCEEEAVIADKNNIENLISTLKQWRSEVDEKRQVFHALEDELQKAKAISDEMFKTYKERDLDFDWHKEKADQLVERWQNVHVQIDNRLRDLEGIGKSLKYYRDTYHPLDDWIQQVETTQRKIQENQPENSKTLATQLNQQKMLVSEIEMKQSKMDECQKYAEQYSATVKDYELQTMTYRAMVDSQQKSPVKRRRMQSSADLIIQEFMDLRTRYTALVTLMTQYIKFAGDSLKRLEEEEIKRCKETSEHGAYSDLLQRQKATVLENSKLTGKISELERMVAELKKQKSRVEEELPKVREAAENELRKQQRNVEDISLQKIRAESEAKQYRRELETIVREKEAAERELERVRQLTIEAEAKRAAVEENLLNFRNQLEENTFTRRTLEDHLKRKDLSLNDLEQQKNKLMEELRRKRDNEEELLKLIKQMEKDLAFQKQVAEKQLKEKQKIELEARRKITEIQYTCRENALPVCPITQATSCRAVTGLQQEHDKQKAEELKQQVDELTAANRKAEQDMRELTYELNALQLEKTSSEEKARLLKDKLDETNNTLRCLKLELERKDQAEKGYSQQLRELGRQLNQTTGKAEEAMQEASDLKKIKRNYQLELESLNHEKGKLQREVDRITRAHAVAEKNIQHLNSQIHSFRDEKELERLQICQRKSDHLKEQFEKSHEQLLQNIKAEKENNDKIQRLNEELEKSNECAEMLKQKVEELTRQNNETKLMMQRIQAESENIVLEKQTIQQRCEALKIQADGFKDQLRSTNEHLHKQTKTEQDFQRKIKCLEEDLAKSQNLVSEFKQKCDQQNIIIQNTKKEVRNLNAELNASKEEKRRGEQKVQLQQAQVQELNNRLKKVQDELHLKTIEEQMTHRKMVLFQEESGKFKQSAEEFRKKMEKLMESKVITENDISGIRLDFVSLQQENSRAQENAKLCETNIKELERQLQQYREQMQQGQHMEANHYQKCQKLEDELIAQKREVENLKQKMDQQIKEHEHQLVLLQCEIQKKSTAKDCTFKPDFEMTVKECQHSGELSSRNTGHLHPTPRSPLLRWTQEPQPLEEKWQHRVVEQIPKEVQFQPPGAPLEKEKSQQCYSEYFSQTSTELQITFDETNPITRLSEIEKIRDQALNNSRPPVRYQDNACEMELVKVLTPLEIAKNKQYDMHTEVTTLKQEKNPVPSAEEWMLEGCRASGGLKKGDFLKKGLEPETFQNFDGDHACSVRDDEFKFQGLRHTVTARQLVEAKLLDMRTIEQLRLGLKTVEEVQKTLNKFLTKATSIAGLYLESTKEKISFASAAERIIIDKMVALAFLEAQAATGFIIDPISGQTYSVEDAVLKGVVDPEFRIRLLEAEKAAVGYSYSSKTLSVFQAMENRMLDRQKGKHILEAQIASGGVIDPVRGIRVPPEIALQQGLLNNAILQFLHEPSSNTRVFPNPNNKQALYYSELLRMCVFDVESQCFLFPFGERNISNLNVKKTHRISVVDTKTGSELTVYEAFQRNLIEKSIYLELSGQQYQWKEAMFFESYGHSSHMLTDTKTGLHFNINEAIEQGTIDKALVKKYQEGLITLTELADSLLSRLVPKKDLHSPVAGYWLTASGERISVLKASRRNLVDRITALRCLEAQVSTGGIIDPLTGKKYRVAEALHRGLVDEGFAQQLRQCELVITGIGHPITNKMMSVVEAVNANIINKEMGIRCLEFQYLTGGLIEPQVHSRLSIEEALQVGIIDVLIATKLKDQKSYVRNIICPQTKRKLTYKEALEKADFDFHTGLKLLEVSEPLMTGISSLYYSS

SEQ ID NO: 170 - DNA, 8684 bp, Homo sapiens
  Pemphigoid antigen
gagctgccacttttcaccgttagaagtagagctttttccagacctcctaccttttagtctactttgaaaggtgaaagaaagaacatcgtttcaggaataaaaatgcacagtagtagttatagttaccgtagcagtgattctgtgtttagtaacactaccagcactcgaaccagtcttgattcaaatgaaaatcttctcttggttcattgtggtccaacactgatcaactcttgcattagcttcggtagtgaatcctttgatggacacaggttagaaatgttgcaacagattgccaacagagttcagagggacagtgtcatctgtgaagacaaactgattcttgctggaaatgctcttcagtctgattctaaaagattagaatcaggagtgcagtttcagaatgaagcagaaattgctgggtatatacttgaatgtgagaaccttttacgccagcatgtaattgatgtacagattcttattgatggaaaatactaccaggcagatcaattggtacagagggttgcaaaactgcgtgacgaaattatggccttaaggaacgaatgttcttctgtgtacagcaaaggacgcatactgacaacagaacagacaaagctcatgatatcaggaatcactcaaagtttaaactcaggatttgcacagaccttacaccctagtctgacctcagggctgacccagagtttaacaccttccctaacctcttctagtatgacttctggcctgtcatcagggatgacttcccgcctgactccatctgtcactccagcttatacacctggtttcccatcaggattagttccaaatttcagttcaggagtagagccaaattcattgcaaactttgaagttgatgcagatccgaaaaccccttctaaagtcttctttgctggatcaaaatttaacagaagaagaaatcaatatgaaatttgttcaggatcttttgaattgggttgatgagatgcaggtacaactggaccgcactgagtggggctcagatttgccaagtgttgaaagccatttagaaaatcataaaaatgttcatagagctattgaagaatttgaatctagtctcaaagaagctaaaatcagtgagattcaaatgacagcacctcttaaactgacttatgcagaaaagttgcacagattagagagtcagtatgcaaaactcttgaatacatccaggaatcaagaacggcaccttgatacactccataattttgtaagtcgtgcgactaatgaacttatttggttgaatgaaaaagaagaggaggaagttgcttatgactggagtgagagaaacaccaacatagctaggaaaaaagattatcatgctgaattaatgagagaacttgatcaaaaggaagaaaatattaaatcagttcaggagatagcagagcagctacttctagaaaatcatccagcccggttaactattgaggcctacagagcggcaatgcagacgcagtggagctggatcttacagctctgccagtgtgtggagcagcacataaaggagaacacagcgtatttcgagtttttcaatgatgccaaagaagctactgattacttaaggaatctaaaagatgccattcagcggaagtacagctgtgatagatcaagcagcattcacaagctagaagaccttgttcaggaatcaatggaagagaaagaagaacttctgcagtacaaaagcactatagcaaacctaatgggaaaagcaaaaacaataattcaactgaagccaaggaattctgactgtccactcaaaacttctattccgatcaaagctatctgtgactacagacaaattgagataaccatttacaaagacgatgaatgtgttttggcgaataactctcatcgtgctaaatggaaggtcattagtcctactgggaatgaggctatggtcccatctgtgtgcttcaccgttcctccaccaaacaaagaagcggtggaccttgccaacagaattgagcaacagtatcagaatgtcctgactctttggcatgagtctcacataaacatgaagagtgtagtatcctggcattatctcatcaatgaaattgatagaattcgagctagcaatgtggcttcaataaagacaatgctacctggtgaacatcagcaagttctaagtaatctacaatctcgttttgaagattttctggaagatagccaggaatcccaagtcttttcaggctcagatataacacaactggaaaaggaggttaatgtatgtaagcagtattatcaagaacttcttaaatctgcagaaagagaggagcaagaggaatcagtttataatctctacatctctgaagttcgaaacattagacttcggttagagaactgtgaagatcggctgattagacagattcgaactcccctggaaagagatgatttgcatgaaagtgtgttcagaatcacagaacaggagaaactaaagaaagagctggaacgacttaaagatgatttgggaacaatcacaaataagtgtgaggagtttttcagtcaagcagcagcctcttcatcagtccctaccctacgatcagagcttaatgtggtccttcagaacatgaaccaagtctattctatgtcttccacttacatagataagttgaaaactgttaacttggtgttaaaaaacactcaagctgcagaagccctcgtaaaactctatgaaactaaactgtgtgaagaagaagcagttatagctgacaagaataatattgagaatctaataagtactttaaagcaatggagatctgaagtagatgaaaagagacaggtattccatgccttagaggatgagttgcagaaagctaaagccatcagtgatgaaatgtttaaaacgtataaagaacgggaccttgattttgactggcacaaagaaaaagcagatcaattagttgaaaggtggcaaaatgttcatgtgcagattgacaacaggttacgggacttagagggcattggcaaatcactgaagtactacagagacacttaccatcctttagatgattggatccagcaggttgaaactactcagagaaagattcaggaaaatcagcctgaaaatagtaaaaccctagccacacagttgaatcaacagaagatgctggtgtccgaaatagaaatgaaacagagcaaaatggacgagtgtcaaaaatatgcagaacagtactcagctacagtgaaggactatgaattacaaacaatgacctaccgggccatggtagattcacaacaaaaatctccagtgaaacgccgaagaatgcagagttcagcagatctcattattcaagagttcatggacctaaggactcgatatactgccctggtcactctcatgacacaatatattaaatttgctggtgattcattgaagaggctggaagaggaggagattaaaaggtgtaaggagacttctgaacatggggcatattcagatctgcttcagcgtcagaaggcaacagtgcttgagaatagcaaacttacaggaaagataagtgagttggaaagaatggtagctgaactaaagaaacaaaagtcccgagtagaggaagaacttccgaaggtcagggaggctgcagaaaatgaattgagaaagcagcagagaaatgtagaagatatctctctgcagaagataagggctgaaagtgaagccaagcagtaccgcagggaacttgaaaccattgtgagagagaaggaagccgctgaaagagaactggagcgggtgaggcagctcaccatagaggccgaggctaaaagagctgccgtggaagagaacctcctgaattttcgcaatcagttggaggaaaacacctttaccagacgaacactggaagatcatcttaaaagaaaagatttaagtctcaatgatttggagcaacaaaaaaataaattaatggaagaattaagaagaaagagagacaatgaggaagaactcttgaagctgataaagcagatggaaaaagaccttgcatttcagaaacaggtagcagagaaacagttgaaagaaaagcagaaaattgaattggaagcaagaagaaaaataactgaaattcagtatacatgtagagaaaatgcattgccagtgtgtccgatcacacaggctacatcatgcagggcagtaacgggtctccagcaagaacatgacaagcagaaagcagaagaactcaaacagcaggtagatgaactaacagctgccaatagaaaggctgaacaagacatgagagagctgacatatgaacttaatgccctccagcttgaaaaaacgtcatctgaggaaaaggctcgtttgctaaaagataaactagatgaaacaaataatacactcagatgccttaagttggagctggaaaggaaggatcaggcggagaaagggtattctcaacaactcagagagcttggtaggcaattgaatcaaaccacaggtaaagctgaagaagccatgcaagaagctagtgatctcaagaaaataaagcgcaattatcagttagaattagaatctcttaatcatgaaaaagggaaactacaaagagaagtagacagaatcacaagggcacatgctgtagctgagaagaatattcagcatttaaattcacaaattcattcttttcgagatgagaaagaattagaaagactacaaatctgccagagaaaatcagatcatctaaaagaacaatttgagaaaagccatgagcagttgcttcaaaatatcaaagctgaaaaagaaaataatgataaaatccaaaggctcaatgaagaattggagaaaagtaatgagtgtgcagagatgctaaaacaaaaagtagaggagcttactaggcagaataatgaaaccaaattaatgatgcagagaattcaggcagaatcagagaatatagttttagagaaacaaactatccagcaaagatgtgaagcactgaaaattcaggcagatggttttaaagatcagctacgcagcacaaatgaacacttgcataaacagacaaaaacagagcaggattttcaaagaaaaattaaatgcctagaagaagacctggcgaaaagtcaaaatttggtaagtgaatttaagcaaaagtgtgaccaacagaacattatcatccagaataccaagaaagaagttagaaatctgaatgcggaactgaatgcttccaaagaagagaagcgacgcggggagcagaaagttcagctacaacaagctcaggtgcaagagttaaataacaggttgaaaaaagtacaagacgaattacacttaaagaccatagaggagcagatgacccacagaaagatggttctgtttcaggaagaatctggtaaattcaaacaatcagcagaggagtttcggaagaagatggaaaaattaatggagtccaaagtcatcactgaaaatgatatttcaggcattaggcttgactttgtgtctcttcaacaagaaaactctagagcccaagaaaatgctaagctttgtgaaacaaacattaaagaacttgaaagacagcttcaacagtatcgtgaacaaatgcagcaagggcagcacatggaagcaaatcattaccaaaaatgtcagaaacttgaggatgagctgatagcccagaagcgtgaggttgaaaacctgaagcaaaaaatggaccaacagatcaaagagcatgaacatcaattagttttgctccagtgtgaaattcaaaaaaagagcacagccaaagactgtaccttcaaaccagattttgagatgacagtgaaggagtgccagcactctggagagctgtcctctagaaacactggacaccttcacccaacacccagatcccctctgttgagatggactcaagaaccacagccattggaagagaagtggcagcatcgggttgttgaacagatacccaaagaagtccaattccagccaccaggggctccactcgagaaagagaaaagccagcagtgttactctgagtacttttctcagacaagcaccgagttacagataacttttgatgagacaaaccccattacaagactgtctgaaattgagaagataagagaccaagccctgaacaattctagaccacctgttaggtatcaagataacgcatgtgaaatggaactggtgaaggttttgacacccttagagatagctaagaacaagcagtatgatatgcatacagaagtcacaacattaaaacaagaaaagaacccagttcccagtgctgaagaatggatgcttgaagggtgcagagcatctggtggactcaagaaaggggatttccttaagaagggcttagaaccagagaccttccagaactttgatggtgatcatgcatgttcagtcagggatgatgaatttaaattccaagggcttaggcacactgtgactgccaggcagttggtggaagctaagcttctggacatgagaacaattgagcagctgcgactcggtcttaagactgttgaagaagttcagaaaactcttaacaagtttctgacgaaagccacctcaattgcagggctttacctagaatctacaaaagaaaagatttcatttgcctcagcggccgagagaatcataatagacaaaatggtggctttggcatttttagaagctcaggctgcaacaggttttataattgatcccatttcaggtcagacatattctgttgaagatgcagttcttaaaggagttgttgaccccgaattcagaattaggcttcttgaggcagagaaggcagctgtgggatattcttattcttctaagacattgtcagtgtttcaagctatggaaaatagaatgcttgacagacaaaaaggtaaacatatcttggaagcccagattgccagtgggggtgtcattgaccctgtgagaggcattcgtgttcctccagaaattgctctgcagcaggggttgttgaataatgccatcttacagtttttacatgagccatccagcaacacaagagttttccctaatcccaataacaagcaagctctgtattactcagaattactgcgaatgtgtgtatttgatgtagagtcccaatgctttctgtttccatttggggagaggaacatttccaatctcaatgtcaagaaaacacatagaatttctgtagtagatactaaaacaggatcagaattgaccgtgtatgaggctttccagagaaacctgattgagaaaagtatatatcttgaactttcagggcagcaatatcagtggaaggaagctatgttttttgaatcctatgggcattcttctcatatgctgactgatactaaaacaggattacacttcaatattaatgaggctatagagcagggaacaattgacaaagccttggtcaaaaagtatcaggaaggcctcatcacacttacagaacttgctgattctttgctgagccggttagtccccaagaaagatttgcacagtcctgttgcagggtattggctgactgctagtggggaaaggatctctgtactaaaagcctcccgtagaaatttggttgatcggattactgccctccgatgccttgaagcccaagtcagtacagggggcataattgatcctcttactggcaaaaagtaccgggtggccgaagctttgcatagaggcctggttgatgaggggtttgcccagcagctgcgacagtgtgaattagtaatcacagggattggccatcccatcactaacaaaatgatgtcagtggtggaagctgtgaatgcaaatattataaataaggaaatgggaatccgatgtttggaatttcagtacttgacaggagggttgatagagccacaggttcactctcggttatcaatagaagaggctctccaagtaggtattatagatgtcctcattgccacaaaactcaaagatcaaaagtcatatgtcagaaatataatatgccctcagacaaaaagaaagttgacatataaagaagccttagaaaaagctgattttgatttccacacaggacttaaactgttagaagtatctgagcccctgatgacaggaatttctagcctctactattcttcctaatgggacatgtttaaataactgtgcaaggggtgatgcaggctggttcatgccactttttcagagtatgatgatatcggctacatatgcagtctgtgaattatgtaacatactctatttcttgagggctgcaaattgctaagtgctcaaaatagagtaagttttaaattgaaaattacataagatttaatgcccttcaaatggtttcatttagccttgagaatggttttttgaaacttggccacactaaaatgtttttttttttttacgtagaatgtgggataaacttgatgaactccaagttcacagtgtcatttcttcagaactccccttcattgaatagtgatcatttattaaatgataaattgcactcgctgaaagagcacgtcatgaagcaccatggaatcaaagagaaagatataaattcgttcccacagccttcaagctgcagtgttttagattgcttcaaaaaatgaaaaagttttgcctttttcgatatagtgaccttctttgcatattaaaatgtttaccacaatgtcccatttctagttaagtcttcgcacttgaaagctaacattatgaatattatgtgttggaggaggggaaggattttcttcattctgtgtattttccgg

SEQ ID NO: 171 - protein, 871 aa, Rattus norvegicus
  Copg2
MIKKFDKKDEESGSGSNPFQHLEKSAVLQEARIFNETPINPRRCLHILTKILYLLNQGEHFGTMEATEAFFAMTRLFQSNDQTLRRMCYLTIKEMATISEDVIIVTSSLTKDMTGKEDVYRGPAIRALCRITDGTMLQAVERYMKQAIVDKVSSVASSALVSSLHMMKISYDVVKRWINEAQEAASSDNIMVQYHALGVLYHLRKNDRLAVSKMLNKFTKSGLKSQFAYCMLIRIASRLLKESEDGHESPLFDFIESCLRNKHEMVIYEAASAIIHLPNCTARELAPAVSVLQLFCSSPKPALRYAAVRTLNKVAMKHPSAVTACNLDLENLITDSNRSIATLAITTLLKTGSESSVDRLMKQISSFVSEISDEFKVVVVQAISALCHKYPRKHSVMMTFLSNMLRDDGGFEYKKAIVDCIISIVEENPESKEAGLAHLCEFIEDCEHTVLATKILHLLGKEGPRTPVPSKYIRFIFNRVVLENEAVRAAAVSALAKFGAQNESLLPSILVLLQRCMMDTDDEVRDRATFYLNVLQQRQMALNATYIFNGLTVSIPGMEKALHQYTLEPSEKPFDMKSIPLAMAPVFEQKSEITLVTPKPEKLAPSRQDIFQEQLAAIPEFMNLGPLFKSSEPVQLTEAETEYFVRCVKHMFTDHIVFQFDCTNTLNDQLLEKVTVQMEPSDSYEVLCCIPAPSLPYNQPGICYTLVRLPDEDPTAVAGTFSCTMKFTVRDCDPNTGVPDEDGYDDEYVLEDLEVTVSDHIQKILKPNFAAAWEEVGDAFEKEETFALSSTKTLEEAVNNIITFLGMQPCERSDKVPENKNSHSLYLAGVYRGGYDLLVRSRLALADGVTMQVTVRSKERTPVDVILASVG

SEQ ID NO: 172 - DNA, 3068 bp, Rattus norvegicus
  Copg2
atgattaaaaaattcgacaagaaggacgaggagtctggtagtggttccaatcctttccagcatttggagaagagtgctgtcttgcaggaggcacgcatattcaacgaaacgcccatcaatccaagaagatgcttgcatatcttgacaaagattctttacttactcaaccagggtgaacacttcggaactatggaagctacagaagccttctttgcaatgactcgattgtttcaatctaatgatcaaacgctgaggcggatgtgctacctcaccatcaaggaaatggccaccatctctgaggatgtgatcattgtcacaagcagtctgaccaaggacatgactggaaaggaagatgtataccgaggcccagccatcagggctctctgcagaatcacagatggaacaatgttgcaagccgttgaaaggtacatgaagcaggccattgtggataaagtatccagtgtagccagctcagcgctggtctcttccttacacatgatgaagataagctatgatgtggttaaacgatggataaatgaagcccaagaagctgcatcaagtgacaatatcatggtgcagtaccatgcactaggagtgctctatcaccttaggaagaatgatcggcttgctgtctccaagatgttaaataagtttaccaaatctggtctcaaatcacagtttgcatactgtatgctgattcgaattgctagtcgcttactgaaagaaagcgaggatggtcatgaaagtccactctttgatttcattgagagctgcttgcgaaataaacacgaaatggttatttatgaagctgcttctgccattattcatcttcccaactgtactgcaagagagctggcacctgctgtctcagttcttcaacttttctgtagctctcctaaaccagccttgagatatgcagctgtgaggaccctgaacaaggtggcaatgaagcacccctctgctgttactgcctgcaatctggacttagaaaacttaatcacagactcaaacaggagcattgctaccctggccattacaacattgctcaaaacaggaagcgagagcagtgtagacaggcttatgaagcagatatcttcttttgtgtctgaaatctcagatgagttcaaggtggtggtcgtgcaggccatcagtgctctctgtcacaagtaccctcggaagcacagcgtcatgatgacttttctttccaacatgcttcgagatgatggaggttttgaatacaaaaaggccattgtggactgcataatcagcattgtggaagagaaccctgagagtaaagaagctggtctagcccacctctgtgaattcattgaggactgtgaacataccgttctggctactaaaattctccacttattgggcaaagagggccctagaactcctgttccctccaagtatatcagattcatttttaatagggtggtcctggagaatgaggctgtcagagctgctgctgtgagtgctttggctaaatttggggctcagaatgagagccttctccccagcatccttgtactcttacaaaggtgtatgatggatactgatgatgaggtacgggaccgagctaccttctacctgaatgtgctacagcagagacagatggccctgaatgctacatatatcttcaatggtctgacagtctctataccagggatggaaaaggccttacaccagtatacattggagccttcagaaaaaccctttgatatgaagtcaattcctcttgctatggctcctgtctttgagcagaagtcagaaattacacttgtgactcctaagccagagaagttggctccttccaggcaagacattttccaagaacagttagctgccattcctgagtttatgaacctgggacccttgtttaagtcttctgagcctgtgcagcttacagaagcagagacagagtatttcgttcgctgtgtgaagcacatgtttactgaccatattgtattccagtttgactgtaccaacactctaaatgaccagctgctggagaaagtaacagtgcagatggaaccatccgattcctatgaagtgctgtgctgtatcccagctcccagcctcccttacaatcagccaggaatatgctacacacttgttcgattgccagatgaagatcctacagcagttgcaggcacctttagctgtaccatgaagttcacagtccgggattgtgaccctaatactggagttccagatgaagatggatatgatgatgaatatgtgctggaagatcttgaagtaactgtgtctgatcatattcagaagatactaaaacctaacttcgctgctgcctgggaagaggtgggagatgcctttgaaaaagaagaaacctttgccctgagctctacaaaaacccttgaagaagctgtcaacaacatcatcacatttcttggtatgcagccatgtgagaggtcagataaagtccccgagaataagaactcccactccctctatctagcaggtgtatacagaggtggctatgacttattggtgcggtccaggctggccctagctgatggagtgaccatgcaggtgactgtgagaagcaaagagagaacgcctgtggatgttatcttggcttctgtgggataagttcttgctgggaagggtgatgttgctatgccctccctattggtggtttttaggctagtggcatgatcttccaagaatcacacataaagattaataatgatgactttgaagaagcaaatccaagtgtttggccctgcgccagcagatcaaacatctgtctgtctgtctgtctttgagcatgagctttagagtttcttccctcatctcatgtctcactcactcagcctcggtgcgacaatgcagctttgagtgggcttgaaaatcagatactacttatgctattctacagctgcttagcttcattatatgcttctatttaatgtgtgaaaaactcttggcaatgctggaaaattttatcccagaagggtggagggggaggggaagccggaatccatttttgtcacagtttgtttttattaatagaaaataaacactcattcattccaaaaaaa

SEQ ID NO: 173 - protein, 621 aa, Homo sapiens
  F-box protein Fbx21
MAAAAVDSAMEVVPALAEEAAPEVAGLSCLVNLPGEVLEYILCCGSLTAADIGRVSSTCRRLRELCQSSGKVWKEQFRVRWPSLMKHYSPTDYVNWLEEYKVRQKAGLEARKIVASFSKRFFSEHVPCNGFSDIENLEGPEIFFEDELVCILNMEGRKALTWKYYAKKILYYLRQQKILNNLKAFLQQPDDYESYLEGAVYIDQYCNPLSDISLKDIQAQIDSIVELVCKTLRGINSRHPSLAFKAGESSMIMEIELQSQVLDAMNYVLYDQLKFKGNRMDYYNALNLYMHQVLIRRTGIPISMSLLYLTIARQLGVPLEPVNFPSHFLLRWCQGAEGATLDIFDYIYIDAFGKGKQLTVKECEYLIGQHVTAALYGVVNVKKVLQRMVGNLLSLGKREGIDQSYQLLRDSLDLYLAMYPDQVQLLLLQARLYFHLGIWPEKVLDILQHIQTLDPGQHGAVGYLVQHTLEHIERKKEEVGVEVKLRSDEKHRDVCYSIGLIMKHKRYGYNCVIYGWDPTCMMGHEWIRNMNVHSLPHGHHQPFYNVLVEDGSCRYAAQENLEYNVEPQEISHPDVGRYFSEFTGTHYIPNAELEIRYPEDLEFVYETVQNIYSAKKENIDE

SEQ ID NO: 174 - DNA, 1866 bp, Homo sapiens
  F-box protein Fbx21
atggcggcggcagcagtcgacagcgcgatggaggtggtgccggcgctggcggaggaggccgcgccggaggtagcgggcctcagctgcctcgtcaacctgccgggtgaggtgctggagtacatcctgtgctgcggctcgctgacggccgccgacatcggccgtgtctccagcacctgccggcggctgcgcgagctgtgccagagcagcgggaaggtgtggaaggagcagttccgggtgaggtggccttcccttatgaaacactacagccccaccgactacgtcaattggttggaagagtataaagttcggcaaaaagctgggttagaagcgcggaagattgtagcctcgttctcaaagaggttcttttcagagcacgttccttgtaatggcttcagtgacattgagaaccttgaaggaccagagattttttttgaggatgaactggtgtgtatcctaaatatggaaggaagaaaagctttgacctggaaatactacgcaaaaaaaattctttactacctgcggcaacagaagatcttaaataatcttaaggcctttcttcagcagccagatgactatgagtcgtatcttgaaggtgctgtatatattgaccagtactgcaatcctctctccgacatcagcctcaaagacatccaggcccaaattgacagcatcgtggagcttgtttgcaaaacccttcggggcataaacagtcgccaccccagcttggccttcaaggcaggtgaatcatccatgataatggaaatagaactccagagccaggtgctggatgccatgaactatgtcctttacgaccaactgaagttcaaggggaatcgaatggattactataatgccctcaacttatatatgcatcaggttttgattcgcagaacaggaatcccaatcagcatgtctctgctctatttgacaattgctcggcagttgggagtcccactggagcctgtcaacttcccaagtcacttcttattaaggtggtgccaaggcgcagaaggggcgaccctggacatctttgactacatctacatagatgcttttgggaaaggcaagcagctgacagtgaaagaatgcgagtacttgatcggccagcacgtgactgcagcactgtatggggtggtcaatgtcaagaaggtgttacagagaatggtgggaaacctgttaagcctggggaagcgggaaggcatcgaccagtcataccagctcctgagagactcgctggatctctatctggcaatgtacccggaccaggtgcagcttctcctcctccaagccaggctttacttccacctgggaatctggccagagaaggtgcttgacatcctccagcacatccaaaccctagacccggggcagcacggggcggtgggctacctggtgcagcacactctagagcacattgagcgcaaaaaggaggaggtgggcgtagaggtgaagctgcgctccgatgagaagcacagagatgtctgctactccatcgggctcattatgaagcataagaggtatggctataactgtgtgatctacggctgggaccccacctgcatgatgggacacgagtggatccggaacatgaacgtccacagcctgccgcacggccaccaccagcctttctataacgtgctggtggaggacggctcctgtcgatacgcagcccaagaaaacttggaatataacgtggagcctcaagaaatctcacaccctgacgtgggacgctatttctcagagtttactggcactcactacatcccaaacgcagagctggagatccggtatccagaagatctggagtttgtctatgaaacggtgcagaatatttacagtgcaaagaaagagaacatagatgagtaa

SEQ ID NO: 175 - protein, 771 aa, Homo sapiens
  KIAA0235
EFSNPETQNLDAMEQVGLESLQFDYPGNQVPMDSSGATVGLFDYNSQQQLFQRTNALTVQQLTAAQQQQYALAAAQQPHIAGVFSAGLAPAAFVPNPYIISAAPPGTDPYTAAGLAAAATLAGPAVVPPQYYGVPWGVYPANLFQQQAAAAANNTASQQAASQAQPGQQQVLRAGAGQRPLTPNQGQQGQQAESLAAAAAANPTLAFGQGLATGMPGYQVLAPTAYYDQTGALVVGPGARTGLGAPVRLMAPTPVLISSAAAQAAAAAAAGGTASSLTGSTNGLFRPIGTQPPQQQQQQPSTNLQSNSFYGSSSLTNSSQSSSLFSHGPGQPGSTSLGFGSGNSLGAAIGSALSGFGSSGGLTNGSGRYISAAPGAEAKYRSASSTSSLFSSSSQLFPPSRLRYNRSDIMPSGRSRLLEDFRNNRFPNLQLRDLIGHIVEFSQDQHGSRFIQQKLERATPAERQMVFNEILQAAYQLMTDVFGNYVIQKFFEFGSLDQKLALATRIRGHVLPLALQMYGCRVIQKALESISSDQQSEMVKELDGHVLKCVKDQNGNHVVQKCIECVQPQSLQFIIDAFKGQVFVLSTHPYGCRVIQRILEHCTAEQTLPILEELHQHTEQLVQDQYGNYVIQHVLEHGRPEDKSKIVSEIRGKVLALSQHKFASNVVEKCVTHASRAERALLIDEVCCQNDGPHSALYTMMKDQYANYVVQKMIDMAEPAQRKIIMHKIRPHITTLRKYTYGKHILAKLEKYYLKNSPDLGPIGGPPNGML

SEQ ID NO: 176 - DNA, 5162 bp, Homo sapiens
  KIAA0235
agaattttcaaatcctgaaactcagaatctggatgccatggaacaagttggtctggaatccttacagtttgactatcctggtaatcaggtaccaatggactcttcaggagctactgtaggcctttttgactacaattcccagcagcagctctttcagaggactaatgcactaacagttcaacagttaactgcagctcaacagcagcaatatgcattagcagcagctcagcagccacatatagctggtgtattctcagcaggccttgctccagctgcatttgtgccaaatccatacattattagtgctgctcctccagggaccgatccgtatactgcagcaggattggctgcagcagctacattagcaggtccagcagtggttccacctcagtattacggcgttccatggggggtgtatccagccaacttatttcagcagcaagctgcagctgcggcaaataacacagccagtcagcaagcagcatcacaagctcagcctggacagcaacaggttctccgtgctggagcaggtcagcgtcctcttactcccaatcagggtcagcaagggcagcaagcagaatcacttgcggcagctgcagcagcaaatccaacattggcttttggtcagggtcttgctactggcatgccaggctatcaagtactagctccaactgcctattatgatcagactggtgccttagtggttggccctggagcaaggactggccttggagctccagttcggttaatggctccaacacctgttttaattagttcagcagcagcacaagctgcagcagcagcagcagctggaggaactgcaagtagccttacaggcagcacaaatggtctgtttcggccaattggcactcagccaccacagcagcagcaacagcagccaagcactaatctgcaatctaattcattttatggaagcagttctttgactaatagctcccagagtagttctttattttctcatggacctggtcaacctggaagtacatctcttggctttggaagtggtaactctttgggtgctgctataggctcagccctcagtggatttggttcatcaggaggactgacaaatggtagtggtcgatatatctctgcagcacctggagcagaagcaaaatatcgaagtgcttcaagcacttccagtctatttagctccagcagccagctctttcctccttcccggcttcggtataataggtctgatattatgccttctggccgcagtagattattggaagatttcagaaacaaccgcttcccaaaccttcagcttagagacttgattggacatatagttgagttttctcaagaccagcatggttctagattcatacagcaaaaactagagagagctactccagctgagcgacagatggtatttaatgaaattctgcaagcagcctatcaattaatgactgatgtttttggcaactatgttatacagaagttttttgagtttgggagtctggatcaaaaattagccctggctactcgtattcgtggtcatgttctacccttagccttgcagatgtatggctgccgcgttattcagaaagcattagaatctatttcttctgaccagcagagtgaaatggtaaaggagctggatggtcatgtgctcaaatgtgtgaaagatcagaatggaaaccatgttgtacaaaaatgtatcgaatgtgttcagccacagtcactacagttcatcattgatgctttcaagggacaagtatttgtgctttcaactcatccttatggctgcagagtaattcagcgcatcctagagcattgcactgcagaacagaccttacctatcttagaagaactccaccaacatacagagcagttggtacaggatcagtatggcaattatgttattcagcatgtactggaacacggtcgacctgaagacaagagcaaaattgtttccgaaatcaggggaaaggttttagccctgagtcaacacaaatttgccagcaatgtagtagaaaagtgtgttactcatgcctcccgtgctgagagagctttactgattgacgaggtttgctgccagaatgatggtcctcacagtgccttatacaccatgatgaaggaccagtatgccaattacgtggttcaaaagatgattgatatggctgaacctgctcagagaaagataatcatgcacaagattcgacctcacattactactttgcgcaaatacacatacgggaagcatatactggccaagttggaaaagtattatttgaagaatagcccggacctaggacctattggaggaccaccaaatggaatgctgtaaattacaggagcaagagaaagaagataatttaaccatgtgaaaagaatttttttgtgcgtgaattatcaaaacacaactcaactatgaatcttcaatttttttttaaagcaaaactatttattgactttattcatccatttgtaaattttttaaggttcttgtgtatatttggggggtgggggatgaattataaattatattcagccctgagtggagacctatcagattggattgctggcaaagcacagaatgcctgtatatgatgtaactgtatcaaaaataaaaagctgtcacatattttgtaaatttttaccttgtaaagtcacaaaaatagtttttaaaggaaaaagtacagtattcttttaataaactggctcacagtctggtaggtctacaaccccatagcacaacaggtttatagagatgtatatagaattatagtccttatttttttcctttgcgtgaaaccttttataacagattaacaatcaactgcataaatattattaatattttaaaaagagttaagttgtattttgataattcacaaactatcatgcaaataacgagtaagtagacaagaataaagtggtttgagatgaaaagaacctaacattatttacagtagatgtggttttaatacaattactgccctaaaatgtctctggcaatgtacagaaatattgtatatacttacatatgtaattgttgtaagagttaaatacaaaatcatggtgacacttccaattaagtgcactaaatgaaaagttaagtcacttattaacttttcagtttggtttgcaatgagaaagagtggaaatttgtattttgttttgcttatagaattacagacatgttgaggaagtgttgagctttattttgctttttcatagaggcagaaagtaggaaccagatagagatgaaaaggggccactgaaaagtgaatttgatagctcagcatttaagcatgattacatattcagatagctctttttgctttctataaatatatgcattgtgtgtgtagtaatagatgtaagtttacactttgaaaggaaatcttgtttcaatgtttattataaaagccttgctaatttagtagtgatgctttccttggttgtacaggtgtacatttgtaaaccttcatgctgtaaatggaatttgttttatctctttgggatacatttgcattttagtgtacatttacgtccctgccctctttgacctggcaatatagtgttgtataatgtaaatttatttctccaaatcgagagtgattttttaaaaattttttatctttatatggtttcagaagtatgaaccagctttctttttattattgtgagatcattttgttttataacatagttgttgactgttaatatggacctgctagaatttggatcactttcaattgaagtcagggtattgtgcataatagaaagtattggactgagatatttggttaccatggaggccaatgcttttttcatcttattaaatgtgatgtgacttttttctttgtacagaagagtactgtatttttgaatagcctactcccaagtaagagcaaatctgtatgataacattttttcctctggacataagacataacagtaacacgatgtacatttacaagcggccttatgtacatttcccaacaatctttttaaggcaaaattgtgaccatatgtgtataattaaaatcgtttttaatcctttgcctatgaaaatattttggaaaaaaacttgctgtgtatattcagtttctgaaagataaagaaagtgctttgtattttgttgaagtcagtattttgtataaacatttatgttgacccacttatgttcagtgctgaaaactaaaatgaacatgctattctgtcagctgaatatggaagagatctttttttactagagatctgcagaagaaacgcaatcttctgagcacaatatggaatctaaaggttttatcacttagttgttcatattatgaacctaaaaataatggcataaagtttggggatgccaggcatactttttcatgtttggtgttgagttattttacttttctaacccaacattccttggtgagaccattaaatccaaacacttgtcaccgttccttctcatagtcactctgggtcatcagcatgtcccagtcactgcagcaacgccttgtgtttgtttcatttttttaaaacccacacaaagccgctgtctcactttttcctactttaccaacctcagagtatttcggcccgtatcgaacttttgttctcagtatcagcccatggtttcaggatcaaagctgtcatgttggagattggtaatggctttcctgtctttgtacagttgaattcctagtcttccttcatccttgccctctgttggcacaggcattatctctgcaattttagaaaatgacaagtagagaatactacattgagaaactaaaccctcttcttggggtcctgatactcattcccatttgtcccagtgctgacaacccaatcttcccaatactttcaggcctgctctacaaaagtacctgttcttgtagaaattttacagtctgccattttgggtgcccaccccaatttttaccttttagtaagttggcatgaaattttggtaaaatctgaaaatcacatttcagaataaaacaattgggcaaaactacctaggctttactcttgagtgtctccttttgatagggattgtttctggaccagtttgtctaagtcctggctcttattggttcatatgaaataatgttaacttcacttctttgtatattatgtataaattagaaaatgaaaaatgtgtgaataacattgtatgaaat

SEQ ID NO: 177 - protein, 547 aa, Homo sapiens
  KIAA 1212
QQLDITSTKLNNQCELLSQLKGNLEEENRHLLDQIQTLMLQNRTLLEQNMESKDLFHVEQRQYIDKLNELRRQKEKLEEKIMDQYKFYDPSPPRRRGNWITLKMRKLIKSKKDINRERQKSLTLTPTRSDSSEGFLQLPHQDSQDSSSVGSNSLEDGQTLGTKKSSTMNDLVQSMVLAGQWTGSTENLEVPDDISTGKRRKELGAMAFSTTAINFSTVNSSAGFRSKQLVNNKDTTSFEDISPQGVSDDSSTGSRVHASRPASLDSGRTSTSNSNNNASLHEVKAGAVNNQSRPQSHSSGEFSLLHDHEAWSSSGSSPIQYLKRQTRSSPVLQHKISETLESRHHKIKTGSPGSEVVTLQQFLEESNKLTSVQIKSSSQENLLDEVMKSLSVSSDFLGKDKPVSCGLARSVSGKTPGDFYDRRTTKPEFLRPGPRKTEDTYFISSAGKPTPGTQGKIKLVKESSLSRQSKDSNPYATLPRASSVISTAEGTTRRTSIHDFLTKDSRLPISVDSPPAAADSNTTAASNVDKVQESRNSKSRSREQQSS

SEQ ID NO: 178 - DNA, 4748 bp, Homo sapiens
  KIAA 1212
caacaattggatattacatcaaccaagctgaataaccagtgtgagttgctaagccaacttaaaggaaatttagaagaagaaaatcggcatctactagatcaaattcagacattaatgctacagaacagaacacttttggagcagaatatggaaagcaaggatctttttcatgttgaacaaagacagtacattgataagttaaatgaattaagacgtcagaaggagaaactagaagagaaaattatggatcaatacaaattttatgacccatctcctcctagaaggagaggcaactggattactctaaaaatgagaaaattgataaagtctaagaaagatattaatcgggaacgccagaaatctctaacattaacacccacccgctcagactccagtgaaggatttcttcagctccctcatcaagacagtcaagatagttcttcagtaggttcaaactctttagaagatggccagaccttggggaccaagaaaagcagcaccatgaatgacctggtgcagtccatggtcctagcaggacagtggacaggtagtactgagaatttggaggttcctgatgatatttcaacgggtaaaaggagaaaagaattgggagctatggccttctctactacagccatcaacttttcaactgtcaactcttctgcaggcttcagatccaagcagttggttaataataaagatactacatcctttgaagacataagtccacaaggtgttagtgatgattctagtacgggatcaagagttcatgcttcaagaccagccagccttgatagtggcagaacatccactagcaatagcaataataatgcttcactacatgaagtcaaagcaggtgcagttaataaccaaagcaggccacaaagccacagcagtggagaatttagcctgcttcatgaccatgaggcttggtccagcagtggtagcagtccaatccagtacttgaaaagacagaccagatcaagcccagtgctccagcacaaaatatctgaaacactggagagtcgacatcacaagatcaaaactggttcccctggaagtgaagttgttactctacaacagtttttggaagaaagcaataagcttacctcagtacagataaagtcctcaagtcaagagaatcttttagatgaagtaatgaaaagtttgtctgtctcttctgactttttgggaaaagacaaaccagttagctgtggtctggccaggtcagtaagtggaaaaaccccaggggacttctatgatagacggacaactaagcctgagtttttgagacctggtcctcgaaaaactgaagatacctacttcattagttctgcgggaaaacctacaccaggcactcaaggaaaaataaaattagtaaaagaatcttctctgtcacgacaatcaaaagatagtaacccttatgcaactttacctcgtgcaagcagcgtgatctcaactgccgaaggaactacacgaaggacaagcatccatgattttttgaccaaggacagtagactgcctatatcagttgattcaccaccagctgctgctgacagcaacaccactgcagcatctaatgtggacaaagtacaagaaagcagaaattcaaaaagcaggtctagggagcaacaaagctcctaattctattacccactacatgacatgtgggccaagtgagagaaaagtgtccttcagtttctcagtatgaagcctttatttctgaagtaacaagacacctagcaactataggaatcatttttaaaaatttttaaggagacttttaacagtccttcgtgaatagagcaggcaagaaatacaaaccttcattccttgaatcaaggagcactactggattcaactgccaaaattttttaaaggttttaggacttactataccttgtactgttaagatctactgaataaaggacgttctctcactaaggaccaggtgttttaaggttaagtgtttaaagaagtactccaagaacaatctgcttttttcatcatttgttttatgaatttatccatgtttgcttaatgcttctgctaagtgttagccaaaatctagccatttatatttagttgtgtaaacctaaattaaatgctgtagtattttgtggaatgtactatatagcaagatacagagaaaattgttttggcatgtcagagccttatttggttagcagactgcatgtgttgatactttttttttcttaaagccaattattttgatgcaaaagaaattcagtttataagataaatctgaaaaatccataatgaaataggagttataaaaaatttatagtgatattaatctttccatatttcccattaagcaacactaagcattcataagttaacccatggtaaagagtgtttttctgaaacttttttttagtaagatggtttttcagcaaatggcattcccaagataaagctgttgtgctttaactcatttcttttctttggtattgggttatgtatgcgtgtgcatttttttaacttgagagctgactgttgcttaagaagttttcttatggcaaaaataatgtaaataagttactatgatctgcattttgccagaaactcatttataattaaggctatcatttattaatgatttttttctcctttatgatattacattaaagttgataactgttattggtacttttgaaatatttgtatgtatttgttacctttaaacatttggaagaagcacaaaaaaatagatttagttaacccagggaaacatcaatttttttagtagttccaattttatatcacagttttattttcttatgaaatcaaaaaatgcattgatactcattaatgcaaattcattatttaacatcaatatcagagtaatcttcaaggtctgaaatgagaaacatactgactttttaaaattttaacagtgtacttcttaggctttcattaccagctctgaagaactttttggaataattccatattccatagtgtgtggtttatgagttgtgggtttcatcactaacccagtaaccataagaaaagtctctctctctctctctctctctttctctctccctctttctctctctctttcgtaggccagtagcaatgttgtgttcacagtctaatttccaaaagaccatcaataaaaaagagagcatgtttaaattgaaatggaacttagagaacttgagcttacttacgtacttcaatgccaccggtaacttaggttttaccaccaaatgctgttaacattaaatcattttgaaaatcttggatgaaaggtgctatgtaaatggaaatacaaaggattcttactaacatacaaaaataatgcacaacagaaatatctaaaaccttttccgtagactttgaaacatctctctctgtcataactccctggattcaagtagcacattggtaataggtatcagagcagtctagagacaattgcatgtcaaaaaatgtacattcatttttaggtggataaaagtaaacatagaaattatgttatggctaaatacagttagtgggtaacttagatttatattagctagcatctaatttgcacaactagaacacatcccagaacaattactgaaaagctgaaatttaatgggtggtgatgtagcccaatgagggcgaatgacattccagcttgacctctccagaacactaatatcctaaaatacagaacatgctgggttaagtgcattagtgcttcaagcagaaaatgctgaaaacaacgtgtaaagtactgaatctgagtaggctgaccctgagaagggacaattaaagagacaaccaagggaacacattgagactacaaaaatatgaataatctcaattatattcatcacacttttttcataccatttcaagaaacgactagacagtagtaaccacatgaatattttactttctccagtataccttgagaagcaaactttgtaggaagccactcttctcccctaaacaacttctgccaaacaataataaagccaactggaaacgaatcggagccattttcattttcctaaccggggcctgacatgctttaaattatctggctgtattctaaatcaacacctaacccctcaaggaaactgaagaatcaatatacagggtaatagctttggctcagagctccaataatgtgcttcagatctgtccatgtggaaatgctttcatccaaatttttaaattggtggttaccaaagagttcacaaaacaggtttgtatgtagcacctttcatgcaaggcatgcaaaaagcctattttaaaatcactgtgcatattatagagttgtagccacctcacaatgaagtactacagcctgtgctgtcttaatggtttatgtcaggaaatgaaaaagatactgtaccaaatctggaattacaatggggagtaataatgtatactaaatgacttttgtattttaagttactttttgtgagtggtgaatttttgtgtttttcttttcagctacacttagtcctgagatgtattttttctttaagtcttgaatgaatacaaaaggagcccattttataatataaaccttgatgtacatgttgagatatttggacaatgaaaatgccttaaaaggaatgcatatggataaagttgcacttataacacccttcaacaaaatctaattttaaattgtctttttcttttctattaagggttttctttttcagtgtctaccattgtacttataactgttattaaataccaaatcaaataat

SEQ ID NO: 179 - protein, 298 aa, Mus musculus
  Osteoglycin
METVHSTFLLLLFVPLTQQAPQSQLDSHVNYEYATGNSEETKFSQDYEDKYLDGKSIKEKETMIIPDEKSLQLQKDEVIPSLPTKKENDEMPTCLLCVCLSGSVYCEEVDIDAVPPLPKESAYLYARFNKIKKLTAKDFADMPNLRRLDFTGNLIEDIEDGTFSKLSLLEELTLAENQLLRLPVLPPKLTLLNAKHNKIKSKGIKANTFKKLNKLSFLYLDHNDLESVPPNLPESLRVIHLQFNSISSLTDDTFCKANDTRYIRERIEEIRLEGNPIALGKHPNSFICLKRLPIGSYF

SEQ ID NO: 180 - DNA, 1268 bp, Mus musculus
  Osteoglycin
tcagtcactcctaacttcagtcaccttgtgtctgctgaaatggagactgtgcactctacatttctcctgctactcttcgtgcctctgacacagcaagcaccacagtcgcagctggactcacatgttaactatgagtatgcaacaggcaattctgaagaaaccaaatttagccaggattatgaagataaatacctggatgggaaaagtattaaggaaaaagaaactatgataattcctgatgagaaaagtcttcagttacaaaaagatgaagttataccatcattaccaaccaagaaagaaaatgatgaaatgcccacatgcctgttgtgtgtctgcttaagtggctctgtctactgtgaagaagttgacattgatgctgtaccaccattgccaaaggaatcagcttatctttatgcacgattcaacaaaattaaaaagctgactgccaaggattttgcagacatgccaaacctaagaagacttgattttacgggaaatttgatagaagacatagaagatgggactttttcaaaactttctctgttagaagaacttacacttgctgaaaaccaactactaagacttccagttcttcctccaaagcttactttacttaatgccaaacacaacaaaatcaagagtaaaggaattaaagcaaacacattcaaaaaactgaataaactctcttttctctatttggaccataacgacctggaatctgtgcctcctaatttaccagaaagtctacgtgtaattcaccttcagtttaacagcatatcttcacttacagatgatacattctgcaaggctaatgacactcgttacattcgggagcgaattgaagagattcgcctggagggcaatccaattgctctgggaaagcatccaaacagttttatctgcttaaaaagattacccatagggtcatacttctaaccccatcagtgcagcttataacctaaggtacatgtgcctaatgtctaaaggaacagaaacattagtttaacattaccgttttatctcactatgatggaagtttatgtttaaacaaagtgtccaaaattgttgtatgtgactacaaaaataatccagcctgaatctcttagttcaaaacaaaatactgtgaaactaaacagcattaagggtctccttgttgttataccaaaccactatctaaatagcatgcttttacacagacacttgcttgagatacaccattcccatgactaatgaagtaagaaaattccaagaaacttgcaactgtttgt

SEQ ID NO: 181 - protein, 346 aa, Homo sapiens
  SAM68-like phosphotyrosine protein alpha
MEEKYLPELMAEKDSLDPSFTHALRLVNQEIEKFQKGEGKDEEKYIDVVINKNMKLGQKVLIPVKQFPKFNFVGKLLGPRGNSLKRLQEETLTKMSILGKGSMRDKAKEEELRKSGEAKYFHLNDDLHVLIEVFAPPAEAYARMGHALEEIKKFLIPDYNDEIRQAQLQELTYLNGGSENADVPVVRGKPTLRTRGVPAPAITRGRGGVTARPVGVVVPRGTPTPRGVLSTRGPVSRGRGLLTPRARGVPPTGYRPPPPPPTQETYGEYDYDDGYGTAYDEQSYDSYDNSYSTPAQSGADYYDYGHGLSEETYDSYGQEEWTNSRHKAPSARTAKGVYRDQPYGRY

SEQ ID NO: 182 - DNA, 1963 bp, Homo sapiens
  SAM68-like phosphotyrosine protein alpha
gcgcggcgtgcaggtcgcagctgtggctcgggtgctggcaggtgctggcgggactggcggggatcgccgtggactgcctcaggggcgccgcagcccgctcggcccgagggcccgcctaaccgcgccgcccgcgcccgctcctcctcggcccgcgcccggagcgcgggggccgccggcgctgggtactcggcggccaccggggatcggggctgagcggtcggttcccgcccccgtgccgccgccgccgccttccggccgaccgcccggcttggccgctgctgccgcgtctggcccccgggtccccgccgctgggggcgcgggcggggtcgggggttgccgggcgccgccccccgtgcgcctggagtccacatcccgggcccggcggccggcgagcatggaggagaagtacctgcccgagctgatggcggagaaggactccctggacccctccttcacgcacgccctgcgcctggtgaaccaagaaatagaaaagtttcaaaaaggagaaggcaaggatgaagaaaagtacatcgatgtggtgattaataagaacatgaagctgggacagaaagtgttaattcccgtaaaacagttccctaagttcaactttgtggggaaacttttgggtccacgtggcaattctctgaagcgtttacaagaagaaaccttgacaaaaatgtccatccttgggaaaggttccatgagagacaaggccaaggaagaagagttgaggaaaagtggagaagcgaagtacttccatctcaatgatgatctccatgttctcattgaagtgtttgccccacctgcagaagcttatgccaggatgggacatgctttggaagaaatcaaaaagttcctcatccctgattataatgatgagatcaggcaagcacagctccaggagttaacatatttgaatggtggttcagaaaatgcagatgttccagtggttcgagggaaacccaccttgcgtacaagaggtgtaccagccccagcaataaccaggggaaggggaggagttacagcccggccagttggagttgtagtaccacgagggacgccaactcccagaggagtcctgtccacccgagggccagtgagtcggggaagaggacttctcactcccagagcaagaggagtccccccaactgggtacagacctccaccgccacccccgacacaagagacttatggagaatatgactatgatgatggatatggcactgcttatgatgaacagagttatgattcctatgataacagctatagcaccccagcccaaagtggtgctgattactatgattacggacatggactcagtgaggagacttatgattcctacgggcaagaagagtggactaactcaagacacaaggcaccttcagcgaggacagcaaagggcgtctacagagaccagccatatggcagatactgattgtactgtctgatgttgtgaaatagccaatctccaccagtcctgtatactgttcaaagtaatttttttctatgaacaatccctttttaaataaatcaaaatgcttaaaatctgaatggatggaacttaaaactactttgttgaaacatcaacctgggcagaaaaaaagaaaaaaagacatgtaaaattttgttatttccagtctgtatatgaaaaaataggtcatcaaaaggaaaaaaaataactttgattaactagtgttaaacaaaaaataggtttactaaatatgttaatctattcttttaacataagcctcacctttcattttaaaggtttccatagaatttagttattttatctttcagccatatgctagtttttttttctcttgccaacatgcgtaaaaagggaagccaattacaagtgcaaataatgtggtattcttttgtaactcaagtcttgaaatgttctgtagtgttaagcaaagtctcctcttgcttgatactaaataaacttttgaaaaaaaaa

SEQ ID NO: 183 - protein, 178 aa, Rattus norvegicus [sequence omitted]

SEQ ID NO: 184 - DNA, 585 bp, Rattus norvegicus
  Ribosomal Protein L11
tcttcctgttctccaccatggcgcaagatcagggtgaaaaggagaaccccatgcgggaacttcgtatccgcaagctctgcctcaatatctgcgtgggggagagtggagacagactgacccgagcagccaaggtgttggagcagctcacaggccagacccctgtgttttccaaagctagatacaccgtcaggtcctttggcatccggcgaaatgagaaaatcgctgttcactgcactgtccgtggagccaaggcagaggagattctggagaaaggcctgaaggtgcgagagtacgaattacggaagaataacttctcagataccggcaactttggctttgggattcaggaacacattgacctaggcatcaaatatgacccaagcattggcatctatggcctggatttctatgtggtgctgggtaggccaggtttcagcatcgcagacaagaagcgcagaacaggctgcattggggccaaacacagaatcagcaaagaggaggcaatgcgctggttccagcagaagtatgatggcatcatccttcctggcaaataaactttatccaaaggccaataaagttttctca

SEQ ID NO: 185 - protein, 221 aa, Rattus norvegicus
  Tspan-2
MGRFRGGLRCIKYLLLGFNLLFWLAGSAVIAFGLWFRFGGTIKDLSSEEKSPEYFYVGLYVLVGAGALMMAVGFFGCCGAMRESQCVLGSFFTCLLVIFAAEVTTGVFAFIGKDVAIRHVQSMYEEAYSDYVRDRGRGNGTLITFHSAFQCCGKESSEQVQPTCPKELPGHKNCIDKIETIISVKLQLIGIVGIGIAGLTIFGMIFSMVLCCAIRNSRDVI

SEQ ID NO: 186 - DNA, 3854 bp, Rattus norvegicus
  Tspan-2
ggacgccgccgccggggtcgcagcatggggcgttttcgcgggggcctgcggtgcatcaagtatttgctgctcggcttcaacctgctgttctggctagccggatcggccgttattgcatttggactatggtttcgatttggaggtaccataaaggatttatcatcagaggagaagtccccagagtatttctatgtggggctgtatgtgctggttggagctggagccctaatgatggctgtgggtttctttgggtgctgtggagccatgcgtgagtcacagtgtgtgctcggatctttttttacctgtctgctggtgatattcgctgctgaagtaaccactggagtgtttgcatttataggcaaggatgtagctatacgacacgtacagagcatgtatgaggaggcctacagcgattacgttagggacaggggaaggggaaatggaactctcattaccttccactcagcatttcagtgctgtggaaaagaaagctctgaacaagtccagcccacgtgtccaaaggagcttccaggccacaagaattgcatcgacaaaattgaaaccataatcagtgttaagctccagctcattggaattgttggtattgggattgcgggtctcacgatctttggcatgatattcagcatggtgctctgctgtgcaatacggaactcacgcgatgtgatttgaagatacttcatgaaaattgcaatctagagtgttcgtgctaattatcacaagagctcgtggctcatttttaatattcaggatattagaagctaaaataattttctgtcaactgtatatttgcacatgtatgtatgtttgattcattactgatttgcctcctggagtgaatgtctctggtttctggaatgcattgcacatactgatagctgtttcggaaaccctagttcttgtatgcaagaataacttatttaattgccagaaaaaagcaatgagagatatttaaaacttggctattcattaaatgtaataatgggtccatttctcagattttagccatgaaaatgagatacataaagagaatgcaggatttctagttaatggaagcaataagatataagaattgaagggccatagattgactgtgtctgagttgaatgtaaaggtttctttaaaaaaaaaattctccccagaatacagtaaaccacagttttagaactaaacacatctgtaaaagtaaatatagcatggaaaaatataatttgaaaaagtcatgctttcttagcatttaaaaacagaaaacctctctctggaaagagaagtcacatagacaagcatgtgccccataaaagcgagtgctttttggactaaaaataacaacttttaaggggaaatcctgttatccgaggtcatgtaaatgttgctttagccctcttctctcctgactctgctttgaactgctggaagcctcacctttccacaagggctttccctcatctcagtgcttctccagatgtggtgacagaggaaagcaagaactgtgcagtgtgacagtgggggacctcgctggcactgtgcctctggaatacctcgtagcttgagtttacatactttcctcattgttttccatttttcttatttatcagtgcagagaattcttcatagattaagaaatcagttttattctttaaaataagtagaccccctgtaactcagagtatgtttagtagtavcctgactaaaccaagataaacaccttcttcaatatatatacacgcagcaaaggcaagttaatgaatccaaaatgtttcatgcatacaggctgcagcacaaatatattctttcttagcaaatccctgtggaataaatgcctcaggctctgtggatacctgagtgattgattttaagtggggaaacccacagcggggtctaaattggcacattttttagaacagaacaacttgttaaaggatataaattgtgaattcttaagattgtatttgaccacacaaaaaaatgaaggtgtgagggattctggaaaccatcagggaagcttctgtgcccgctaagaacataagactttgatgtgtgctagaacaaagtaccatgtttcaggaaacttttacaagtgttttgctgaggacacacaactgctgggatgtcttgcccacagagtgccacctctctcttttcagatatgcttgctactgctcctagctttggagaaaaactgagggagttaaaagtgtaactgtatgactactttacctacagatgcaaaagagtatttaaaaaacatcacttcttgatgtttgtaccccagtggctgacaaaggccagcttttcaggcagacaaagagcgatcagtccttcttttagctttagtctatctgtcttcctgaagacagaggacaggctccagagtgtactcaggttctccagctcagagttatttcccgttcctcagaagtaagtttcgttcctcagtgagtgagtgagtttaaagaaaaccacagtaactatagacagaagaataattttttaatgcagaggaataagtctagaaatccgtatcctgtgtgattagtgtacctctctgagggttaagctttccaaagaatgtactgggtaaaaatagagaattccatctctgagtgaagatggatatatatctttatgtgaatggataaagctatatctgtagagatatataacccctctgtcctgaacctatacataccttaaatacgtatctcttaaggatatatacatatgtaacttaatacatgtgtgccctggtggaaactatggagataaatgtttgtatacatacacatgtacatgtatgtaaatttacagttatttctgtttacctgaactaatttgagatcagacccaaacattttaagttattttaaattaaattttctatgtacttacactgtttgagttatcttaaaatcttactgtatcttcttaacacattcatgtgacttattcaatgtgttacctaccagttcacccaaacaatatagaaaaagcagactggtaacccttccatgctgttacttacagcgggttcaaaagcaacacccctagggttctaattacatatagttgtacttcagctcacactagttcacccaagttgttcctccttcctccaagaaaacttggttatctgtggcttggctgtggaggtgatcctgggtccaatgtggccctcctgtacagacagccctcctttccctctgaggaatctaatcgatgtagctgggtgaggatgaggcccagagagatgataataatctcgtaatcagcaaagaggatagcgtgttctcccttctgaaataagtttaccaaatatttgctctcttgtcattggtaaaggtggtttctatggcccagaggccagccacagcccagctttcaaggccccattgacatgctcttgaacaccaagcctgtttcccatacccaggaaagagcaatttatgtctctcgaaggtagagccagcttaagctcacgtgagtcaatttggtttttgtgtgtattttaagattgagattttctattttttttaaacatcctccattttttttactataaaaggtattttgtatatagatgtcttttaaaagtgaaaatactacaacaatacaaaacattattgtttggtgttcttataacaactaagggattcacagtccagatgctgcccctggggaaacagagaaacatggcgaatacaagtaatatatcctgtggttcccaaagtgttgttaacagaaacattctttgtgtttgtggtgtgtttcctgtctattttatgatttcttttacttctattaaacagcaataaaaaattaaaaaaaaaaaaaaaaaa

SEQ ID NO: 187 - protein, 801 aa, Rattus norvegicus
  AMP deaminase isoform C
MRAPVCVGRGGKVIQGTSSTPGEHQRLLVGLATKTEMPRQFPKLNMSDLDEHVRLLAEKVFAKVLREEDSKDVMSLFTVPKDCPIGQKEAKERELQKELAEQKSVETAKRKKSFKMIRSQSMSLQMPTQDWKGPPSVSPAMSPTTPLVLGAASKPGLAPYDMPEYQRATISGDYCAGITMEDYEQAAKSLAKALMIREKYARLAYHRFPRTTAQYLAHQGESVPLEEGLPDFHPPPLPQEDPYCLDDAPPNLGYLVRMQGGVLFVYDNQTMLERQEPHSLPYPDLETYIVDMSHILALITDGPTKTYCHRRLNFLESKFSLHEMLNEMSEFKELKSNPHRDFYNVRKVDTHIHAAACMNQKHLLRFIKYTYQTEPDRTVAEKLGRKITLRQVFDSLHMDPYDLTVDSLDVHAGRQTFHGFDKFNSKYNPVGASELRDLYLKTENYLGGEYFARMVKEVARELEDSKYQYSEPRLSIYGRSPKEWSSLARWFIQHKVYSPNMRWIIQVPRIYDIFRSKKLLPSFGKMLENIFLPLFQATINPQDHRELHLFLKYVTGFDSVDDESKHSDHMFSDKSPSPDLWTSEQNPPYSYYLYYMYANIMVLNNLRRERGLSTFLFRPHCGEAGSITHLVSAFLTADNISHGLLLKKSPVLQYLYYLAQIPIAMSPLSNNSLFLEYSKNPLREFLHKGLHVSLSTDDPMQFHYTKEALMEEYAIAAQVWKLSTCDLCEIARNSVLQSGLSHQEKQKFLGQNYYKEGPEGNDIRKTNVAQIRMAFRYETLCNELSFLSDAMKSEEITALAD

SEQ ID NO: 188 - DNA, 3915 bp, Rattus norvegicus
  AMP deaminase isoform C
tgtgtgtgtgtgtgtgtacatgcgcgcgcccgtgtgtgttgggaggggcgggaaggtgattcaagggaccagttcaacacctggagaacaccaacgcttgctggtcggtttagctaccaagaccgagatgcctcgccaattccccaagttgaacatgtccgatttggacgaacatgtccggctgttggcagagaaggtgttcgctaaggtgctccgagaagaggacagcaaagatgttatgtccctgtttactgtccccaaggactgtcccatcggacagaaggaagccaaggagagggagctacagaaggagttggcagagcagaagtctgtggagacagcaaaaagaaagaagagtttcaagatgatccggtcgcagtctatgtccctgcagatgccaacacaagactggaaaggtcctccatctgtcagtccggccatgtctcctacaacccctctggtccttggagctgcttctaagcctgggctggcaccctatgacatgcctgagtatcagcgagccaccatcagtggagattactgtgcagggatcactatggaagactatgaacaggctgccaagagcctggccaaggccctgatgatccgggagaagtatgcacggcttgcctatcaccgcttcccgcggaccacagcccagtacctggctcatcagggggaaagtgtgcctttggaagagggtctcccagacttccaccctcccccactgccccaggaagacccttattgcctggacgatgcgccccccaacctgggctacctggtccgcatgcagggaggtgttctctttgtgtatgacaatcagacgatgttggaacgccaggaaccccacagcctgccctaccctgacctggagacctacatcgtggacatgagccatattctggcactcatcaccgatggccccacgaaaacctattgtcaccggcgactgaactttctggaatccaagtttagccttcatgagatgttaaatgaaatgtcagagttcaaggaattgaagagtaatccccacagagacttttataatgtgagaaaggtagacacacacatccatgcagcggcctgcatgaatcagaagcacctgctgcgtttcatcaagtacacataccagacagagccggacagaactgtggccgagaagctcggccggaagatcaccctgcggcaggtgtttgacagcctgcacatggacccctacgacctcacagtggactcgctggatgttcatgcgggccggcagacatttcacggcttcgacaagttcaactccaagtacaaccctgtgggggccagtgagcttcgggacctgtatttaaaaactgaaaactacctggggggagagtactttgctcgcatggtcaaggaagtggcccgggaattggaggacagcaagtaccagtactcagaaccccggctgtccatctatggtcgcagtcctaaggaatggtctagcctggcccgctggttcattcagcacaaggtctactcgcccaacatgcgttggatcatccaggtgccgcggatctatgatatatttaggtcaaagaaactactgccaagctttgggaagatgctggagaacatcttcctgccccttttccaggctactatcaaccctcaagaccatcgggagcttcacctcttccttaaatacgtgacagggtttgacagcgtggatgatgagtccaagcacagtgaccacatgttctcagacaagagccccagcccagacctctggaccagcgagcagaacccaccctacagttactacctgtactacatgtatgccaacatcatggtgctgaacaacctccgcagggaacgaggcctgagcacattcttgttccgacctcactgtggggaagccggctccatcactcacctagtgtctgccttcctgactgcagacaacatttcccacgggctgctcctcaagaagagtcctgttttgcagtatctctactaccttgctcagattcctattgccatgtctcctctcagcaacaacagcctgtttctggaatattccaagaacccacttcgggaattcctacacaagggattacacgtctctctctctactgatgaccccatgcagttccactacaccaaggaagcgctcatggaggagtacgccatcgcagcccaagtgtggaagttgagtacgtgtgacctgtgtgagattgccaggaacagcgtgctgcagagcggcctctcacatcaggagaagcagaagtttttgggtcagaattattacaaggagggaccggagggcaatgacatccgaaagacaaatgttgcacagatccggatggctttccgctacgagaccctgtgtaacgagctcagctttctgtccgatgccatgaagtcagaggagatcacagccctggcggactaggccagcgatccacacacactttcatcttttggtttaatgtcaggtctgctggggctaacggtgcccagatctcaaaccggggcttccgtctgtgacgaggacacctctgaagaaatctcaagctcccagttttggttgcactttatgaacatgctcacttcattagcgtttctgagccagaggctggctctcttccatggggctctgggagctggcactgtgtacacctgctccttggttgtccgagtctcctgtgattaccaatgtttatatggttggggctgggactttgcaaggctgaatgccaagtgacacaaggcctgtctggtgtctgccacagtcctcccagcagaccctgtagagcaattctctctttggtatctggctggctggctgcctgaacccccaccaaagccccttttataaagggctacctagagaaaatacaaagctccctgctgacgattgtgcacttttaaaacagtttttttccctgtgagcacccctccttcctgtctaggtaggaagcccaacgcaccctctgaggtcatcacttctgttattttcctcatctaggaatgagtcatctcaaaccatgttctgtgaacccatctcatggtccactcctaggcctggggaagatacagggcgaggttctggggctgttctcacttttttgtttttttaaatgaaggcctttgaaaagcataggacctccgctccttttggctctaatgtcctatgattgtagctgtcaccaccttcccccaggagtcagaccagggactgactcctcaggggagtgaaatgtttcaggacatacaggactagagccaagttcctgatccagtcacacccggtccccgactcccctgcttccacctactattttaggcttcacatattttaatttttttttaaagaatcactgtaacagtgcattttattttaaagcagatttcttcagaagctatcatggtcccagggaccaggtagagttaagtttaatgtggactctagctttatcagactactcatctttgttactagtgcctagaacatagtaggtgctcaataaatacatatggagtaattgaattactttctcttttggcatctgtatgtacagaatactgaacaatgttcaaagatcttcctaactgttcacaaggcaggaagtcctgtaccatacttagatgaacctaattgcacctggaagatgctcatgtaactaattacccccgtcctgtgactctgccagccttccagtgttcacacagcgtatggaaggaaccatgtcatgccttactaggcaaataaacataccaccctacatagctgattatgaaaccgaatgaaacctgtcgttatgagggattatttttgaaaagcctccatttgtatacatttgcccaaacatagcaagtattgtacagtttttcattgtatcaaatacttttttaaagactacaaataaagtctgttaggac

SEQ ID NO: 189 - protein, 142 aa, Rattus norvegicus
  Globin, alpha, major
MVLSADDKTNIKNCWGKIGGHGGEYGEEALQRMFAAFPTTKTYFSHIDVSPGSAQVKAHGKKVADALAKAADHVEDLPGALSTLSDLHAHKLRVDPVNFKFLSHCLLVTLACHHPGDFTPAMHASLDKFLASVSTVLTSKYR

SEQ ID NO: 190 - DNA, 556 bp, Rattus norvegicus
  Globin, alpha, major
acattctccttctgatagactcaggaagcaatcatggtgctctctgcagatgacaaaaccaacatcaagaactgctgggggaagattggtggccatggtggtgaatatggcgaggaggccctacagaggatgttcgctgccttccccaccaccaagacctacttctctcacattgatgtaagccccggctctgcccaggtcaaggctcacggcaagaaggttgctgatgccttggccaaagctgcagaccacgtcgaagacctgcctggtgccctgtccactctgagcgacctgcatgcccacaaactgcgtgtggatcctgtcaacttcaagttcctgagccactgcctgctggtgaccttggcttgccaccaccctggagatttcacacccgccatgcacgcctctctggacaaattccttgcctctgtgagcactgtgctgacctccaagtaccgttaagccgcctcctgccgggcttgccttctgaccaggcccttcttccctcccttgcacctatacctcttggtctttgaataaagcctgagtaggaagc

SEQ ID NO: 191 - DNA, 1081 bp, Rattus norvegicus
  Cytochrome b oxidase, mitochrondrial
ggcacgagaacttcggttctctactaggagtatgcctcatagtacaaatcctcacaggcttattcctagcaatacactacacgtctgataccataacagcattttcatcagtcacccacatctgccgagacgtaaactacggctgactaatccgatacctacacgccaacggccctcaatatttttcatctgcctattcctccatgtgggacgaggactatactatggatcctacactttcctagaaacctgaaacattggaatcattctactatttgcagtcatagcaactgcattcatgggctatgtactcccatgaggacaaatatcattctgaggagctacagtaattacaaacctattatcagctatcccttacattgggactaccctagtcgaatgaatctgaggaggcttctcagtagacaaagcaaccctaacacgcttcttcgcattccacttcatcctcccattcattatcgccgcccttgcaattgtacatcttcttttcctccacgaaacaggatcaaataaccccacaggattaaactccaacgcagacaaaatcccattccatccatattatacaattaaagacctcctaggtgtatttatattactattattcctaataaccctagtactattcttccagacctactaggagaccagacaattatacacccgctaacccctcaacaccccaccccacatcaaaccagaatgatattttctctttgccttacgctattttatgctccattcccaacaaactaggaggaggtcgtgaggccctaatcttatcaatcctaatctttagccttcctaccattcgctgcatacttcaaaacaacgcagcttaacattccgcccaatcacccaaatcctttacggaatcctggtagccaacctccttagtcttatacaggaatcggaggccaaccagtagaacacccatttatcattattggccaactagcctccatcagctacttttcaattatcctcattctcataccaatctctggaattgttgaagacaaaatgttaaaatgaaattaataaaaaaagaaaaaaaaaa

SEQ ID NO: 192 - protein, 342 aa, Rattus norvegicus [sequence omitted]

SEQ ID NO: 193 - DNA, 1897 bp, Rattus norvegicus
  BB1
ccacactttgcattctctggtcaccatcctcgggacctgggccctccattcaggcccagccctgctcctgccacgccctggctctggcctggactttctcctatctcctgttcttccgagccctcagcctcctggcctgcccactcccacgcccttcaccaatgccgtccagctgctgctgacgctgaagctggtgagcctggccagtgaagtccaggacctgcatctggcccagaggaaggaaatggcctcaggcttcagcaaggggcccaccctggggctgctgcgacgtgccctccctgatggagacactcagctacagctactgctacgtgggaatcatgacaggcccgttcttccgctaccgcacctacctggactggctggagcagcccttccccggggcagtgccagcctgcggcccctgctgcgccgcgcctggccggccccgctcttcggcctgctgttcctgctctcctctcacctcttcccgctggaggccgtgcgcgaggacgccttctacgcccgcccgctgcccgcccgcctcttctacatgatccccgtcttcttcgccttccgcatgcgcttctacgtggcctggattgccgccgagtgcggctgcattgccgccggctttggggcctaccccgtggccgccaaagcccgggccggaggcggccccaccctccaatgcccaccccccagcagtccggagaaggcggcttccttggagtatgactatgagaccatccgcaacatcgactgctacagcacagatttctgcgtgcgggtgcgcgatggcatgcggtactggaacatgacggtgcagtggtggctggcgcagtatatctacaagagcgcacctgcccgttcctatgtcctgcggacggcctggaccatgctgctgagcgcctactggcacggcctccacccgggctactacctgagcttcctgaccatcccgctgtgcctggctgccgagggccggctggagtcagccctgcgggggcggctgagcccagggggccagaaggcctgggactgggtgcactggttcctgaagatgcgcgcctatgactacatgtgcatgggcttcgtgctgctctccttggccgacacccttcggtactgggcctccatctacttctgtatccacttcctggccctggcagccctggggctggggctggctttaggtgggggcagccccagccggcggaaggcagcatcccagcccaccagccttgccccggagaagctccgggaggagtaagctgtcacgaccctccctctgccagctggtcccgggaattctgtgaaccaggctgctgtctcctccccagaaagagtccttaccttggagagggtcctggagagaatttcctcttccccagctaaataccctgcctgcaactgaagcagacccgggggtgtcctccctgccctctgcccagaggcacctccactcctacaaaatcaaagtattgtccagacaagagtcactggcccctgctccagcttctgggtatccagagagcactgcacttccccaaaacggaaggggcccctgggcagtgggttttgggcaaattccctttctttgcatccacaatgtgggtcggagcttgggggcaggtcctgggagtgggaagcctcttccttgtgtctttcgctccacttttagctcatcgcaccaatattgcagacttggaaggaagcataacttccatttcacaaaggggaaactgaggtgcgggtgcgggcctggggacggccgtcccatggcttccatctgagccacctcgggaccccagcactcctggcgccctcttcttcatcgcttggcctatgacaggtcaccgtgtgtaaatctttcccaataaagtgttgcacaaaa

SEQ ID NO: 194 - protein, 324 aa, Homo sapiens
  CGI-21 protein
MFSSTSTPSSFTAFQTTMRSSIPHWRISRMCLKPTFTKQQIANLDKQAKLSRAYDGTTYLPGIVGLNNIKANDYANAVLQALSNVPPLRNYFLEEDNYKNIKRPPGDIMFLLVQRFGELMRKLWNPRNFKAHVSPHEMLQAVVLCSKKTFQITKQGDGVDFLSWFLNALHSALGGTKKKKKTIVTDVFQGSMRIFTKKLPHPDLPAEEKEQLLHNDEYQETMVESTFMYLTLDLPTAPLYKDEKEQLIIPQVPLFNILAKFNGITEKEYKTYKENFLKRFQLTKLPPYLIFCIKIFTKNNFFVEKNPTSCQFPYYKCGSERILV

SEQ ID NO: 195 - DNA, 2166 bp, Homo sapiens
  CGI-21 protein
  misc_feature 9: n is a or g or c or t
ggtagtggnagatgtccggccggtctaagcgggagtctcgcggttccactcgcgggaagcgagagtctgagtcgcggggcagctccggtcgcgtcaagggarcgaggatcgggagcgggacctgagcggcgagctcccggggcagccctgtgcgcgtgaagcggggagttcgagccggcgagcgcgcgcgaggccccggcttctgttgtcccgtttgtgcgggtgaagcgggagcgmgaggtcgatgaggactcggagcctgagcgggaggtgcgagcaaagaatggccgagtggattctgaggaccggagagccgccactgcccgtacctggacaccattaacaggagtktgctggactttgactttgagaaactgtgttctatctccctctcacacatcaatgcttatgcctgtctggtgtgtggcaagtactttcaaggccggggtttgaagtctcacgcctacattcacagtgtccagtttagccaccatgttttcctcaacctccacaccctcaagttttactgccttccagacaactatgagatcatcgattcctcattggaggatatcacgtatgtgtttgaagcccactttcacaaagcagcaaattgcaaacttggacaagcaagccaaattgtcccgggcatatgatggtaccacttacctgccgggtattgtgggactgaataacataaaggccaatgattatgccaacgctgtccttcaggctctatctaatgttcctcctctccggaactactttctggaagaagacaattataagaacatcaaacgtcctccaggggatatcatgttcttgttggtccagcgttttggagagctgatgagaaagctctggaaccctcgaaatttcaaggcacatgtgtctccccatgagatgcttcaggcagttgtactttgcagtaagaagacttttcagatcaccaaacaaggagatggcgttgactttctgtcttggtttctgaatgctctgcactcagctctggggggcacaaagaagaaaaagaagactattgtgactgatgttttccaggggtccatgaggatcttcactaaaaagcttccccatcctgatctgccagcagaagaaaaagagcagttgctccataatgacgagtaccaggagacaatggtggagtccacttttatgtacctgacgctggaccttcctactgcccccctctacaaggacgagaaggagcagctcatcattccccaagtgccactcttcaacatcctggctaagttcaatggcatcactgagaaggaatataagacttacaaggagaactttctgaagcgcttccagcttaccaagttgcctccatatctaatcttttgtatcaagatattcactaagaacaacttctttgttgagaagaatccaactagttgtcaatttccctattacaaatgtggatctgagagaatacttgtctgaagaagtacacaagaataccacctatgacctcattgccaacatcgtgcatgacggcaagccctccgagggctcctaccggttccacgtgcttcatcatgggacaggcaaatggtatgaattacaagacctccaggtgactgacatccttccccagatgatcacactgtcagaggcttacattcagatttggaagaggcgagataatgatgaaaccaaccagcagggggcttgaaggaggcgtctagggctttgctcccaagggctgtggctgatgatggtaaataagaacacagaagctgtagctgaacacaggctggctggtgggcttcctaggccagcccagcttgtatgggttctggctacaccagagcaccaagagcccacttgcctgggatggccccacactgtcactcagctgttctttgatcatttttttctagattgatgctcctttctcccatgcattgagctcccatctagcttcagcagggcagaacccttctccagatgtgtgtaacttatgtctgagtatctgggagtagttgaagaacagataattccttccaaacatcaagccttgggattcttggagcaagcagaaagccagtaacttcgctctgttagaggtggaggattttcctatgttccccccatttcctgatttgtatttttagatggattaaatagtctcctgttttt

SEQ ID NO: 196 - protein, 277 aa, Rattus norvegicus
  Myelin proteolipid protein
MGLLECCARCLVGAPFASLVATGLCFFGVALFCGCGHEALTGTEKLIETYFSKNYQDYEYLINVIHAFQYVIYGTASFFFLYGALLLAEGFYTTGAVRQIFGDYKTTICGKGLSATVTGGQKGRGSRGQHQAHSLERVCHCLGKWLGHPDKFVGITYALTVVWLLVFACSAVPVYIYFNTWTTCQSIAFPSKTSASIGSLCADARMYGVLPWNAFPGKVCGSNLLSICKTAEFQMTFHLFIAAFVGAAATLVSLLTFMIAATYNFAVLKLMGRGTKF

SEQ ID NO: 197 - DNA, 3019 bp, Rattus norvegicus
  Myelin proteolipid protein
agagagaaaaagtaaaggacagaagaaggagactggagagaccaggatccttccagctgaacaaagtcagccgcaaaacagactagccagcaggctgcaattggagccagagtgccaaagacatgggtttgttagagtgctgtgctagatgtctggtaggggccccctttgcttccctggtggccactggattgtgtttctttggagtggcactgttctgtggatgtggacatgaagctctcactggtacagaaaagttaattgagacctatttctccaaaaactaccaggactatgagtatctcattaatgtgattcatgctttccagtatgtcatctatggaactgcctctttcttcttcctttatggggccctcctgctggccgagggcttctacaccaccggcgctgtcaggcagatctttggcgactacaagaccaccatctgcggcaagggcctgagcgcaacggtaacagggggccagaaggggaggggttccagaggccaacatcaagctcattctttggagcgggtgtgtcattgtttgggaaaatggctaggacatcccgacaagtttgtgggcatcacctatgccctgactgttgtatggctcctggtgtttgcctgctctgctgtgcctgtgtacatttacttcaatacctggaccacctgccagtctattgccttccctagcaagacctctgccagtataggcagtctctgcgctgatgccagaatgtatggtgttctcccatggaatgcttttcctggcaaggtttgtggctccaaccttctgtccatctgcaaaacagccgagttccaaatgaccttccacctgtttattgctgcatttgtgggtgctgcagccacactagtttccctgctcaccttcatgattgctgccacttacaactttgccgtccttaaactcatgggccgaggcaccaagttctgatctcccatagaaatccccctttgtctaatagcgaggctctaaccacacagcctatagtgttgtgtctcctgtcttaactctgcctttgccactgattggccctcttcttacttgatgagtataacaagaaaggagagtattgcagtgattaatctctctctgtggactctccctcttatgtacctctttcagtcattttgctccacagtgggctcctgctagaaatggggaatacctgagaaggtgattcccccgctgcaagtcgcagaggaatgaaagctctaattgagtttgcaagcatctcctgaaggccaggatgtgcttccttctcaaagggcacttccattgaggaaaacaaagtggaaagaaagattctcaggtagaaagcaggaatgtccttggtctccttgccatcagtaggagtcaaatatattctctttgatgcacaaaaccaagaactcactcttttcttcctagttccactgaagacagaaggaaataagcaatagcatttgcccaaatctgcctcctgcagctaggagaagggggtcaaagcaaggatctttcacccttagaaagagagctctgacgccagtggcaatggactatttaagccctaactcagccaaccttccttacagcattagggagcacagtgtctatttagacaaagtggggcctggaggaggggggcctcatctgtccttacagctcattaggaagagaaacagagtgttgtcaggatcgactcactcccttctccctgataacagctaccatgacaaccttgtggtttccaaggagctgagaatagaagggaactagcttatataaaataagactgtgacctaaggagcatcagttgggggatgctaaaggtgtaaattgagatgccctctggcagatgcaaaacacttaactctttggatagcatctccccccaccccatcagttgtgtcctcttggcctctggcacaatatcttcacaatggtgctcttttccttgggttttatccattcacttacagcaggtgattagaggattttgattagtttcagaatgactcctgtttcatatttcccagttgtttatctcttgtttggagctgtaccagaaagaactggagaatgattctttgagcttagttctttttcaaaagaaaaaagaaaaactggacagtaagcatcacaaaaatatttgaaattgtgtagtcccatgaaatgattgggattttccccaagtattctaccttttgtagaactaggcttggtaaatttgaacctccatttgaataacctgtccaatattttcttttctaataaatgacagatgattttgcttgctaatattatctcagcattttgaaagtttaggcttagcatagaggttattgtgtcttggtatatataggtcacataatagatttcagcaactgccagctgtttagttggtgagcttccagagagctctggagacatggtgaggacagacagaattggaaacctgaagaactcccagatttcaggcttatcctgtacttgttaactttgggtgaaagaaagaaaagcaaagaaagaaaggaaaagcctctgatctgtttttactgaaggaaaagttactgtagattttttttttttgtagatttgtgctgtcattccccaaagtgcttttgtcatgttgaaagagatataaggatttagaagaagatacttgagacttgttcttgggccagtatataaggtaaactagcaggatgcacagtagtgaggagagcttaaaggacctggaagaaaccaatcaagataaaggaaggtgaaataatctatatcttttatttggtttgattttaatatcataacagataaccaaccactccctgaaaacctcacacgtatatatacacacacgcatgcacatacaaagagagttaatcaactgcaagtgtttccttcatttctgatatagaattttgattttaacaacataaaggataaactcttagaaactcatcttacaaaatgtattttataaaattaaagaaaataaaattaagaatgttctc

1. Use of:
(a) an isolated gene sequence that is up regulated in the spinal cord in response to streptozocin-induced diabetes;
(b) an isolated gene sequence comprising a nucleic acid sequence of Tables I to X.
(c) an isolated gene sequence having at least 80% sequence identity with a nucleic acid sequence of Tables I to X;
(d) an isolated nucleic acid sequence that is hybridizable to any of the gene sequences according to (a), (b) or (c) under stringent hybridisation conditions;
(e) a recombinant vector comprising a gene sequence or nucleic acid sequence according to any one of (a) to (d);
(f) a host cell containing the vector according to (e);
(g) a non-human animal having in its genome an introduced gene sequence or nucleic acid sequence or a removed or down-regulated gene sequence or nucleic acid sequence according to any one of (a) to (d);
(h) an isolated polypeptide comprising an amino acid sequence at least 90% identical to an amino acid sequence encoded by a nucleotide sequence according to any one of (a) to (d), or a polypeptide variant thereof with sequential amino acid deletions from the C terminus and/or the N-terminus; or
(i) an isolated polypeptide encoded by a nucleotide sequence according to any one of (a) to (d); or
(j) an isolated antibody that binds specifically to a polypeptide according to (h) or (i);
in the screening of compounds for the treatment of pain, or for the diagnosis of pain.

2. Use according to claim 1 wherein the isolated gene sequence encodes a kinase.

3. Use according to claim 2, wherein the isolated gene sequence encodes an expression product or fragment thereof of Janus protein tyrosine kinase 1 (JAK1), (AJ000556, S63728), phosphatidylinositol 4-kinase, (D84667) or Rho kinase alpha (U38481, U58513, D87931).

4. Use according to claim 2, wherein the isolated gene sequence encodes an expression product or fragment thereof of casein kinase II beta subunit (L15619), ERK3, protein serine/threonine kinase, extracellular (M64301, X80692), or neural receptor protein-tyrosine kinase (trkB), (M55291, X17647).

5. Use according to claim 1 wherein the isolated gene sequence encodes a phosphatase.

6. Use according to claim 5, wherein the isolated gene sequence encodes an expression product or fragment thereof of protein tyrosine phosphatase (AJ007016, AF035644, U48297), putative receptor tyrosine phosphatase (U55057) or calcineurin, A subunit, beta isoform (M31809, M29550).

7. Use according to claim 1 wherein the isolated gene sequence encodes a phosphodiesterase.

8. Use according to claim 7, wherein the isolated gene sequence encodes an expression product or fragment thereof of phosphodiesterase, cAMP-specific (PDE4D) (L27058, L20966).

9. Use according to claim 1 wherein the isolated gene sequence encodes a receptor protein.

10. Use according to claim 9, wherein the isolated gene sequence encodes an expression product or fragment thereof of neurotensin receptor type 2 (NTR2) (X97121) or putative interleukin 1 receptor accessory protein (X85999).

11. Use according to claim 1 wherein the isolated gene sequence encodes a transporter protein.

12. Use according to claim 11, wherein the isolated gene sequence encodes an expression product or fragment thereof of amino acid system A transporter (AF249673), digoxin carrier protein (U88036), synaptic vesicle transmembrane transporter (L01788), glycine transporter (L13600), putative SEDL spondylo-epiphesial dysplasia tarda gene (AF157065), delta-aminolevulinate synthase, erythroid-specific (D86297), polypeptide GalNAc transferase T1 (U35890) or putative NAD+ADP-ribosyltransferase (AJ007780).

13. Use according to claim 1 wherein the isolated gene sequence encodes a G-protein coupled receptor protein.

14. Use according to claim 13, wherein the isolated gene sequence encodes an expression product or fragment thereof of putative K-ras (M54968) or ARF-like protein 5 ARL5 (X78604).

15. Use according to claim 1 wherein the isolated gene sequence encodes a DNA binding protein.

16. Use according to claim 15, wherein the isolated gene sequence encodes an expression product or fragment thereof of TBP-binding protein TIP 120 (D87671), putative chromodomain-helicase-DNA-binding protein (AF054177) or putative origin recognition complex subunit 4: Orc 4 gene (AJ003140).

17. Use according to claim 1 wherein the isolated gene sequence encodes a protease protein.

18. Use according to claim 17, wherein the isolated gene sequence encodes an expression product or fragment thereof of carboxypeptidase D precursor (U62897, D85391, U65090), caspase 2 (Ich-1) (U77933), cathepsin B (X82396, M14222), cathepsin L (EC 34.22.15) (Y00697, M20495), dipeptidylpeptidase (dpp6) (M76427, AF092507, M96859), proteasome subunit C8 (M58593, AF055983, D00762) or putative deubiquitinating enzyme 8 (AF057146 D29956).

19. Use according to claim 1 wherein the isolated gene sequence encodes a ligase, lyase, oxidoreductase, transferase or hydrolase.

20. Use according to claim 19, wherein the isolated gene sequence encodes an expression product or fragment thereof of putative ubiquitin-conjugating enzyme (EC 6.3.2.-) E2 (E12457), putative tryptophanyl-tRNA synthetase (X69656), aldolase A (M12919, Y00516, M11560), 3-hydroxy-3-methylglutaryl coenzyme A reductase (M29249, M11058), NADH subunit 5, mitochondrial (X14848), electron transfer flavoprotein (ETF), alpha subunit (M22030), delta-amino-levulinate synthase, erythroid-specific (D86297), polypeptide GalNAc transferase Ti (35890), putative NAD+ ADP-ribosyl-transferase (AJ007780), arginase II (U90887, U90886), ATP synthase gamma chain, mitochondrial (L1992, D16563), N-G,N-G-dimethylarginine dimethylamino-hydrolase (D86041), putative gluco-cerebrosidase (M24119), putative N-acetyl-glucosamine-6-sulfatase (Z12173), putitive ubiquitin conjugating enzyme (Y17267), or NADH subunit 5, mitochondrial (14848).

21. A non-human animal having in its genome an introduced gene sequence or a removed or down-regulated gene sequence, said gene sequence being up-regulated in the spinal cord of a mammal in response to streptozocin-induced diabetes.

22. A non-human animal according to claim 21, wherein the introduced gene sequence encodes a kinase, a phosphatase, a phosphodiesterase, a receptor protein, a transporter protein, a G-protein coupled receptor protein, a DNA binding protein, a protease, a ligase, a lyase, an oxidoreductase, a transferase, or a hydrolase.

23. A non-human animal according to claim 21 which is C. elegans.

24. A kit comprising;
(a) affinity peptide and/or ligand and/or substrate for an expression product of a gene sequence that is up-regulated in the spinal cord of a mammal in response to streptozocin-induced diabetes; and
(b) a defined quantity of an expression product of a gene sequence that is up-regulated in the spinal cord of a mammal in response to streptozocin-induced diabetes, for simultaneous, separate or sequential use in detecting and/or quantifying up-regulation of a gene sequence in the spinal cord of a mammal in response to streptozocin-induced diabetes.

25. A kit according to claim 24, wherein the gene sequence encodes a kinase, a phosphatase, a phosphodiesterase, a receptor protein, a transporter protein, a G-protein coupled receptor protein, a DNA binding protein, a protease, a ligase, a lyase, an oxidoreductase, a transferase, or a hydrolase.

26. A kit comprising:
(a) nucleic acid sequences capable of hybridization to a nucleic acid sequence that is up-regulated in the spinal cord of a mammal in response to streptozocin-induced diabetes; and
(b) a defined quantity of one or more nucleic acid sequences capable of hybridization to a nucleic acid sequence that is up-regulated in the spinal cord of a mammal in response to streptozocin-induced diabetes,
for simultaneous, separate or sequential use in detecting and/or quantifying up-regulation of a gene sequence in the spinal cord of a mammal in response to streptozocin-induced diabetes.

27. A kit of claim 26, wherein the gene sequence encodes a kinase, a phosphatase, a phosphodiesterase, a receptor protein, a transporter protein, a G-protein coupled receptor protein, a DNA binding protein, a protease, a ligase, a lyase, an oxidoreductase, a transferase, or a hydrolase.

28. A compound that modulates the action of an expression product of a gene sequence that is up-regulated in the spinal cord of a mammal in response to streptozocin-induced diabetes.

29. A compound according to claim 28 wherein the gene sequence is listed in Tables I to X.

30. A compound according to claim 28 wherein the nucleotide sequence encodes a kinase, a phosphatase, a phosphodiesterase, a receptor protein, a transporter protein, a G-protein coupled receptor protein, a DNA binding protein, a protease, a ligase, a lyase, an oxidoreductase, a transferase, or a hydrolase.

31. A compound according to claim 28 for use as a medicament.

32. A compound according to claim 28 for the treatment or diagnosis of pain.

33. A pharmaceutical composition comprising a compound according to claim 28 and a pharmaceutically acceptable carrier or diluent.

34. Use of a compound according to of claim 28 in the manufacture of a medicament for the treatment or diagnosis of pain.

35. Use of a compound according to claim 28 in the manufacture of a medicament for the treatment or diagnosis of chronic pain.

36. A method of treatment of pain, which comprises administering to a patient an effective amount of a compound according to of claim 28.
